United States Patent Application Publication US 2024/0117295 A1 - sequence listing, part 8

SEQ ID NO: 6 - DNA, 3977488 bp, Artificial Sequence (residues 1,988,745-3,977,488 of 3,977,488)
  Synthetic E.coli genome
ccgccgtaatggtctgggtgatttggggcgtgatcgttaatgcctggtttattccagaaattgccagccagttcttcaccatgggtctggtgattggcatcatcggcgttgttttccgccttaacggcatgacggttaataccatggctagttcctttaccgaaggggcgcgaatgatgatcgcccctgccctgctggtgggtttcgccaaagggattttgctgctggtcggtaatggtgaagcgggtgatgccagcgtgttaaataccatcctcaacagcattgccaatgccattagcggtctggacaacgcggtcgcggcctggtttatgttgctcttccaggcggtatttaatttcttcgtgacgtccggttctggtcaggcggcgttaaccatgccgttactggcaccgcttggcgatctggtcggtgttaaccgtcaggttaccgtgctggcgttccagtttggtgatggcttcagtcacatcatttacccaaccagtgcgagcttaatggcaacgctcggtgtgtgcagggtggacttccgtaactggctgaaggtgggcgcgaccctacttggactgctgtttattatgtccagcgtcgtagtgatcggcgctcagttgatgggctaccactaaaaatgttaagagccgcaattgcggctcttttttcattctgccgtttcagtctctacggcttcatttttggcattgcgcttcatccacaacgctagcgctttcaggctgtctggagtgaactcatcgcagcgtgcggtgatttcttccggcgtcagccagcaaacttcactgacttcatcttcctgtagtgcgaagggaccgtgagagacgcagctgaacaatgcgccccagacacggcaatttttatcttcgaaatagaactgcccgtgctcggcaaaggggacaccggcaatgcccaactcttcttccgcttcgcgacgcgcggattccagcagttgctcatcggcctggactacaccgcctgcggtcgcatctaacatgccgggtaaaaagtcttttgtctcggtacgacgctggaccagaattttgcccatgccatcatgcacgacgatgtaagttgcacgatgacgcagacactgtgcccgcatttgttcccggctggcttgtgcaatgacttcgttctcttcattgacaatatccacccattcagtacttgccaaacgacgctgttccattatcaggaaaccttctttttctggcgctcttacggcgcattttgagttgtgggtaaattacggattaatcgcgacctgcgcaatgatactttgatcattgagtgcgattacactaagtacgtcattatccagcatgccataactcgccggattaccgcctttcggaatactcacgctgccggggttgaagtggaaaatctccccccgctgttctgccactggcagatgggtatgaccgtacaccagcacatcgttctggtttaaagcaggcagattttccgggccaaaaagatgaccatgcgtcaaaaacagacgttgtttttccagtaatacctgttgccacggcgcggttatcgggaaatgcagcagcatttgatccacttcgctgtcgcagttgccgcgcacagcgataaccttatgtgccacttcattaagccgttcagcgactttggctggcgcgtaaccctccggtaaagcattacgcgggccgtgattcaacacgtcgccaaggatcaccagccactgggcaccgctttgggcaaacaactccagaacacgttccgtcgccggtaagctcccatgaatgtcgcttgcaaacatcagtttcatcactcactcctcgtcgaaaaaacgtaagctatgatactggattctgtcgttgctatcagccagattgcttcgcgctaagtgcaataaaacgctggacagacgctcgctgccactggaatgttgcataatccaccaggcgttctggcacctcatcgccatgtagtaccaggcggttaatcattagcgccagatcagtatcagcaatgcaccattcaccaaataaattcggctgacccagtactaacaaatgttctgccatcgcgaacagtttctctgcactggcttttccctcggccgttagtggcgcttttttcgcccccgcaaagacaacatccgtcggacgctcttcgcggatgggcatcagatcgctgcgcagccaggcctgaatctgtcgtgcacgcgcacgattttctaaatcaagcggataaatacgttcccaggtcggtgacgcaaatcgatcttccagatactccgcaatggcagaagattcactcaactcaaaatcatcgatttgtaataacggcacacggcgtgtctgaccgtaaccttgccacgtcggctgcaaatgttcaccgctgtcgaggtcgatggtcttgatatgaaagctcaggcctttttcctgcaacgccacccaggcggataacacataaggggagaaaaagtgggcatcactccaaagcgtgatagcgggtttactcattatgtcctcggcaataaagggggctggctatcaaactatagagcctttttgtcactgtcacgtgacgaatactcacgtaagtcgccgcgctttctatacttgtggtgttcagatgattaaacaaccggagctgcaatgatcgatctctatttcgccccgacacccaatggtcacaaaattacgctgtttctcgaagaagcagagctggattatcgcttgattaaggtagacctggggaaaggcggtcagtttcgtccggaatttttgcgcattagccccaacaacaaaattccggcaattgttgatcattctcctgccgatggcggcgaaccgctaagcctctttgagtctggtgccattttgttgtatctggctgagaaaacaggactctttttgagtcatgaaacgcgtgagcgcgccgccacattacagtggttattctggcaggtaggcggactggggccgatgcttgggcaaaatcatcattttaatcacgcagccccccaaaccattccttacgctattgaacgttatcaggttgaaactcagcgtctttaccatgtactgaacaagcggctggaaaacagcccctggctgggaggcgagaactacagcattgcggatattgcctgctggccgtgggttaatgcctggactcgccagcgaattgacctagcaatgtatccggcagtcaagaactggcatgagcggatccgtagccgccctgccaccgggcaggcactgctaaaagcacaactcggtgatgagcgtagcgatagttaacagaaacaggttctcgtgtattatttcatcctaagtaaaacaacggagaacctgcaatggcacaacctgccgctattattcgtataaagaaccttcgtttgcgtacgtttatcggaattaaggaagaagaaattaacaaccgtcaggatattgttatcaatgtgacgatccactaccccgccgataaagcgcgcactagcgaagatatcaacgatgcgctgaattatcgcaccgtaacgaaaaacattattcagcatgtagagaataaccgtttctctttgctggaaaaattaactcaggatgtgctcgatatcgcacgtgaacatcactgggtgacgtatgctgaagtggagatcgataaactgcacgcgctgcgctacgccgatagcgtatccatgaccttaagctggcagcgttaatcgccatatcgggaggctgcatgaacatagtgatcaccggagggacaggattaattggtcgccatttgattccgcgtttgctggagctgggccatcaaattacggtagtgacgcgtaacccgcagaaagccagttccgttctcggccctcgggtgacactatggcaagggcttgccgatcaaagcaacctcaacggcgttgatgcggtaatcaacctggccggagaaccgattgctgataaacgctggactcacgagcaaaaagagcgtctctgccaaagccgctggaatatcacgcaaaaactggtcgatttgattaatgccagcgacacgccaccgagcgtactcatttccggcagcgcaacgggctattatggtgacttaggtgaagtggtggttaccgaagaggaaccgccgcataacgaatttacccataaactctgcgctcgctgggaagaaattgcctgccgggcgcaaagtgacaaaacgcgagtgtgcctgctgcgtaccggtgtagtgctggcaccggatggcggtattctcggtaaaatgctgccgccgtttcgtcttggcctgggcgggccgattggctctggtcggcagtatctggcctggattcatattgatgatatggtcaacggtattctctggctgctggataacgagctgcgcgggccatttaatatggttagcccctacccggtacgcaatgaacaatttgcccatgcgctcggtcatgcgctgcatcgcccggccattttgcgcgtccccgcgaccgccattcgactgttaatgggcgaatctagtgtactggtattaggtggacaacgcgcgctgcctaaacggctggaagaagcgggttttgcgtttcgctggtacgatttagaagaggcgctggcggatgtcgttcgctgatgtggtttacagcaaacatccgccagttaactcccggtgttacaggattagtggctttgcgcgataagatcgtctggactaagtcgggtcaccatcataactaactctctgtctaaacctctatccagcatctcctgagcaatacgcagggcttcttcgtgtttgccctgcattgcgccttcttcacgtaatctgtcagcaatggtcatcagtttctccttttcttgtggtgcgcgttccgctatctcaccaataaatgcacgaaaacgctgggcatcccctgtttgtaatacgtaattaaacagggcttttagctgtctgtcattagtgttccctgtaactagcaggctaacaatttggtcgactaatcccaacagatcgcgctgacgaatatgtttctgaattaactccaacagcgccattttgcggtgttgcataatctcgtcatccggcaccacggtaatatccaccaacggaaaagcgctactatatattttgcgggctatagcaggctcggcaaattcatcaagccagcagagactataaggataaggacttctgcaaccatgataaaacagcatcgggagcaccaatggaagctctttatagcccgcatcaagatggttttgcattgccgcaatggaataacgcatcatgcgaaaagccattaattcttccggcttactttggtgctctatcactacataaatataacccactccctcctgcgttttcacagaccacaagaggtcggaataatattgccgcaggtcttcatcaataaaactgtttggttccagtttaagcgtcgttaaatcacacagtttgcgcagcggcgcgggaagatgaatatcaataaaatcccgcgcggtgtctggatggcgtaaaaaagatttaaataccgcatcatgcggcgtggaagttgtgcttattgtcatggcgttccgtcacccctcaaatttaagatgacgcgacaataaccacgattaacacccaatgcagcaggcagtttttatctttggacagcgaattcagaagtatttttagcggactgtaacttttacatttcagcggaagctgactcgcaaattccccatgaaaatactccggcagcgttagccaccggagaggaaattatttcaggcttcccttaaggaaccgttgcagacgagggctttgcgggttgccaaataactgctccggcgcgccctcttcttctattttcccctgatggaggaaaatgacatgagtagaaacatggcgagcaaagcccatttcgtgagtcactaccaccatggttttcccctcttctgccagttgctgcataatacgcaacacttcgcctaccagttcaggatcgagcgcgctggtaggttcatcaaacagtaaaacttccggttccatcgccagcgcccgcgcgatagaaacacgctgttgctgaccgccggaaagatgcaccggatatttcccctgcgcacgttcgtctatcccgacttttgccagatacttcaccgcccgctcgcgcgcttcctgcttgctcaggcccaacacctgaatcggcgcttccatgacgttttccagcaccgtcatatggctccagagattgaagtgctggaataccatcgtcaggcgtgtgcgcagtaagcgcagttgatttttatcggcgactttgagttgaccgtctttgtcgcgcaccagattgatcgtctggccattgaccacgatgctcccttcactcggtttttcgaggaagttaatgcagcgcagaaaggtacttttcccgcttccgctgcttccgatgatgcttattacatctccggcattcgcttgcagacttacccctttcagcacttcatgttcgccgtagcgtttgtgcaaatcgataacgtttaatttattctcggacatcgtattctcagtgcgtactagaaggtttcacatgctgcaaccagcgtttttccgctctgcgaaagaggctgatcaggacataagagatgattaaatagagcaccgcggcaatgccgaaggcggtaaaaggttgatacgtggcggcgttaatatcgcgggctattttcagcagatccggcaccgtggcagtaaatgccaacgcagtagagtgcagcatcaggatcacttcgttgctgtatgccggtaacgcaatacgcagcgcagaaggcaaaataatgcagcgatacattttaaaagtgctgaagccataggctctggcggcttcaatttccccatgcggaacgctacggattgccccagcaaaaatctcggtagtgtaagcgcaggtgttaagcgtcagcgccagcacggtacagttcaggccactgcggaagaaagcgttaaggaattcggttcccttaacaatctcaagcgtgtacatgccggaatagaacaccagcaactgaacatacagcggcgtaccgcgaaaaatataggtaaataaccagattggaaactggatgtatttattactggagacacgaccaatcgccagaaacagcgccaggactccgcctatcactacgctcaaaataagcagccacagagtgatcgccacaccagtaaagcgataaccgtcggtccacagcagcggtttccagtattcatgtaagatttcgatcacaggtcagccctcttcacacccacggagtagcggcgctcaaggaacagcagcacaccattggaaacagtggtgaaaaccaggtaaatcacgccacagacgatggcgaaatagaacggttcccaggtacttttgcctgccagttgggtggctttgaccacatcttccaggccgagtaagctaaccagtgcggtagatttgaggatcacctgccagttgttgccaatgcctggcagggcgtaacgcatcatgctcggaaacatgatccgccgaaacacttgcccacgagtaaaaccgaacgccgtcgccgcctctatatgtcctttcggcactgccataaaagcaccacggaacgtttcggtaaaataagcaccgtagataaaaccgagagtgataataccagcgaccatcggatcgatatcaatctgcccgacgcccatcgcctccgtcaccgtgtttagcgcaatctgcaaaccgtagaaaatcagcagcatcaacactaagtccggcacgccacgaatcagcgtggtgtacccttcgaaaatcagcccgctaagccgattttggctgagcttaccgccagcgccaattaaaccgatgattacagcgagcactacagagctgatagccagctccagcgtgacgagcgcaccctgtaaaataacaccactaaacccatacaacatgctgcctgtcctgtcgtgtgtggtgaattaccgcctcttgtctccctccggttacccgaagggagcgggctttctttcaccgatggcgattagccaccataaacatcaaaatcgaagtactttttcgctaatttctcgtaagtaccgtcagcgcgcatttcggcaaaggctttgttcagtgcttcgcgcagttcgttatcttctttacgcaggcccatgccggtccctacgccaaacagtttttcatctttaacagacgggccaccgaatttgtaatctttaccgacaggttgtttgaggaaaccttcgctggcagcgacctcatcctggaacgcggcatcaatacgtccggcagtcaggtcagaataaatgttgtcctgcccctgatagctgacgatttcaatgccttttggtgcccaatgttcattaccgaacgtctcctgggtggtgccctgcaatacgcctacccgtttgcctttcaggctctcgactgtcggctgaatgtcagaatttttcgccaccaccaaacgagaatcggcagcgtacagtttgtcggtgaaggctatttcttgctgacgtttttccgtaatggaaaggctactcatgatggcgtcaatcttcttcgcttttaaggacgggattaacgcatccagcggattttcgacaaacgtacattgcgtattgatgcgtttgcataattcctttgccagatcgatatcgaagccaaccagttcgccttgactatttttactttcaaatggcgcataggtcgggtcggtaccgatgcggatgttttgcggaatcgcagcaaacgccgcagttgcgctggagaaggccagaaccagagagaggcttagcaccagttttttcataatgtcctcaactgacagtctttttatagggaatatttacaggtttgttacacttatcgtgccataaaattgaccatcaaggcaaaatatcccgccccgttagacgtattatttttcattaaaaatgcttaagtatgcatttcaatgcaccacgatagtgcaacaaacctggcgtgcaccatgatgatcattccatcaggtacagcttcccagcgacgtatcagtcaccgtagacattaaagtcgaaatactttttcgccatcttgtcgtaggtgccgtcctgacgcagctcgccaagcgccttattgaaggcagccgtcagttcagcatcatctttacgtagccctacaccggtgccatcaccgaagtattttttgtcttttacactactgccagcaaaggcgaaatctttaccagcaggttgcttgaggaatccttcgctggcagcaacttcatcttgtaacgcagcatccagacgtcctgcagccagatcggaatagaccaaatcctggttggcataggccaccacatccacgcctttactacgccaggtctcgttagcgtaagcttcctgggtacttccctgcagcacaccaacatgtttacctttcagactatccagcgttggctgaatcggactacctttggccgcaatcaaacgagaatctgcggcgtacagcttgtcggagaaggcaatctcctgctgacgtttatcggtaatggaaaggctgctaataatagcgtcgatttttttcgctttcagactggggatcagcgcgtcaaagtcactggcaacccaggtacatttcacctgcatccgtttgcacatctcgttaccgagatcgatatcaaagccaacaaaatcacctttagcatctttgctactgaacggtgcgtaggtggtatcggttccgatacgtaccgtctccggtagcgccgcatagctggaagccgctgtggagagaccgactaacaaagacagagcgagaatgctcttcttcatacataaccctcaagtgaaaatggcttttttatgttgtgtattgtgttgtgtgtttgcaggctctttcatgcaggtcttatgccatcttgacgacaacagtaacattcaacgttaaatatgttaataagacgttgcattattgtcctgaagttgaagatagcaggtatagcggttgaatcgcagcgtttcgattgaatggcagaaacaaaatgtcgaggatttgatcgcggttgcaaaattgccctgaaacagggcaacagcggagttatgcgccctgccagcgggcaaagagatcttcaggaagggttatcgcaaactggtcaagaacacgattaaccgtctgatttatcacatcatcaagggattgcgggcgatgataaaacgccggaacgggaggcataatcaccgcaccgatttctgccgcctgagtcattaaacgcagatggcctaagtgcaatggtgtttcacgcacgcagagcaccaacgggcgacgctctttcagcaccacatctgccgcacgggtcagtaagccatcagtatagctatggacaatgccggaaagggttttgatactacagggtaaaatcaccatccccagcgtctggaaagaaccggaagagatgctggcggcaatatcgcgcgcatcgtgcgtgacatcggctaatgcctgcacttcgcgcagagaaaaatccgtttcgagggataaggtctggcgcgctgcctggctcatcaccagatgcgtttcgatatctgtgacatcgcgcagaacctgtaataagcgcacgccataaatcgcgccgctggcaccgctgatgcctacaatgagtcgtttcataaatagttgccctgtcagacttgcaggcagactttgcaggatttcggcgggagttgcaagtcagggtgccagaccggcaccctcagcgaaggcatcatccttcgttatgcatttcgagattttccacttcgttctgacgttgcactgctttggcgtcatcattacgtaacgtatcgaggaaatcgaggtagccctgatcaacatctttggtgacgtagacgccgttgaacacgctgcattcaaactgctggatatccggattttcagcgcgaacggcgtcgatcagatcgttcagatcctggaaaatcaacccgtcagcaccgatgatctggcgaatttcatcaacttcgcgaccgtgagcgatcagttccgtggcgctcggcatatcaataccataaacgttcgggaagcgaatttccggtgccgcagaagcgaggtacactttcttcgctccggcttcgcgtgccatctcgataatctgctcagaagtggtgccacggacgatggagtcgtcgaccagcaggacgtttttatcgcggaactcggcgcggttggcattcagtttacggcgcacggacttacgacgcagctgctggcccggcatgataaaggtgcggccaacatagcggtttttaacgaagccctggcggtacggtttgcccagaatacgagcaatttccagcgcgatatcacagctggtttctgggatcgggatcaccacgtcgatatccagatcttcccattcgcgggcaattttctcgcccagtttcgtgcccatattcacacgcgcgctgtaaacggaaattttgtcgataaagctgtccgggcgggcaaagtatacatactcaaacaggcacggattgctgaccggattgtcagcacattgacgggtaaacaactgcccttcttcagtgatgtaaatcgcttcgcccggcgcgacgtcacgcaggaaatcaaagcccagcgtatcgagcgctacgctttcggaagcgaccatatattctgtacggttctcgtcaatatcacgttttcccagtaccagcggacgaatcccgtttggatcgcggaaagcaaccataccgtggccgataatcatcgccacacaggcatacgcgccgcggattaagcggtttgtggcagcaatggcagcgaaaatattgtcggcttccagcgggtagtggcggaagttgtccagctcgctggcgaagatattaagcagaatttcgctgtcggaagtggtgttgatgtggcggcgtttttcttcaaacagttttttacgcaactcgtgagcgttggtcagattgccgttgtgggcaagcgtaatgccatacggggagttaacgtaaaacggctgcgcttcagaggcgctggagctgccagccgtggggtaacgcacatgaccaatgcccatattgccctgcaaacgctgcatatggcgagcttcaaatacatcgctcaccagcccgttcgctttacgcaaacggaagcagttattggcatctatggtgatgatgccggcggcatcctgaccgcgatgctgaagcaccgttaaggcatcataaatgctctggttaaccggcataacaccggcgataccgacaataccgcacatacgtctttttcctcgttaagccacatctcagagcacttacgctctgggcaagaaactactgctgctttgcagataatcaaaaaaacatctgatgataaaactgaattgcgggatcagctgacttttgctccagtcttcgcttttgctcaccccggtaaaggagtcgagaaagaagagaatggcagcaacaatcaacacaccgcgcaacgcaccgaaacagacgcccagcacccgatcggtgccactcaaccccgttttctccaccaactggcctatcacgaagttcacgatagcaccaacgatcagggtagcgataaacagtaccgcgatggcaatcccatttcgaaccagttcgtcttcaaagcccgtaaaccagacactcaggtaagtgtagtaatgactggcaacaaagaaagcacaaccccatgtcaccaggcttaacgcttcacgaacaaagccgcggatcaggctaaccagagaggaaaaagcaatcaccgcgattatggcgtaatcaatccagaccatatgtgtcccacgattttacgccctgtcatcctgttcggggcgcattctaacagaaaaagaaaacgtttgcgtagggatttccttcccgcgcatcaataaaaatggcgctgaaaaaatattcaacgccatcgactttttatgcctttgcggcatcgggcaatgcgtgtcggatgcggcgtaaacgccttatccgacctacggttctacccctgcgtaggcctgataagacgcgccagcgtcgcatcaggcaagaccgtattaattcggcgtatagcccattaccacgccacttaagccagaaagttgcttcaactcacccaggctacctttcagcttatctttgctggcatccggcccaaccagaatacgggtaattttaccctgcactggcgtggatgggctcgtataaacccgataaccggcaccgcgcagcttaccgacaatctcattcactttatcggcatttttcagcgcacccagttgcacaacataggctttacccgtcggtgcagctttttcttccacgaccggcttcggttctggcttcggcgcaggtggtgcttcaacctttggtttaggcggctccaccggtttcggcttcggtggggcgaccggtgcaggttccggttcaaactcggtgttattggctgcaatagtggccggatcgaggctcggtgctgcggcatcacctgcccgcacctcttccgctgcgccttccggcggctgcgtcggtaacgcctgggtggcggctggcatcatatcaggctcatcacgatcgcccgctttcggcaccagcgggatagccgcgaactcatcctgataatgttttttctgcccgtccagcagccctggaagtacaatcacccccagcgccaccagcacgatcgtgcccactaaccgattctgaaacttacttgccaccgcttctcctcgcgtcaatcacttccatgacatgtgcgaccgtgtggaaagaaccacacaccagcacggtgtcttccgctttagcgtccgccattgcggcatcccatgcctgcgcaacgctatcaaaacttttgccgttacccaaatgctcaagcagttgttctgccgtggcaccgcgcggcccttccagtggcgcacaataccagtcatcaaccacgcttttcaaccaggccagagttccggcaatatctttatcatgtagcataccgataaccgccagcacgcgcccgtttttcggtagcgctttcatacgcccggtgagatattccgccgcatgtggattatgcgcgacatcaaaaataacgcgtgggctctcgctcacaatctggaaacgtcccggcaaaattgcgctggcaatcccgtcgcgaatggcattttcactgacttccagcccgctggcacgcagtgccgccagcgctgttgcggcattcggttgcgggacaagcggcaacggcagattttccagcgtgccgtgagcatcgctaaacgcccagtcatgatcggtgacggaatagttccactcaacgccccgacgttgtaacagtgcacctttttcctgcgccacatcagcaatggtagaaggcatttccggctcaccgacaattgccggtttttcgctgcggaagatgcctgctttctcgcgaccaatactttcgcgatctggacccagccagtcggtatgatccagcgcaatactggttactaccgcgacatcggcgtcgacaatattggttgcgtccagacgaccgcccagccctacttccagaatcaccacgtcaagttgtgcctgcttgaacagccacaacgcgctcagcgtaccgtactcgaaataggtcagggaaatatcaccgcgtgcgctttcaatctccgcaaaagaggcggtgtgggcgctttccggcaattcctggccctgcacacgtacgcgctcggtataacgcaccagatgagggctactgtagacgcccactttgtaccctgccgccatcagaatgctctccagcgtacggcaggtggtgcctttgccattcgtacccgcaacggtaaacacaaatggcgctggtttcaggacgccaagacgcgccgcgaccaggctcacgcgctcaaggccgagatcgatagttttactgtgcaggttttccagataagaaagccagctagccagagggctcgcggcttgaggagtgcgtttgataatcatggtatccgctgattcgttacggtgagaatagcaaaagggcagagccagtggccctgcccttatcagttatcaggcctcaggttcctgatccggtaccgggggtaccactacgccttcacgcggcgcttcaggattcggcgctggcagattcatcaacttcgccagaatgctcgccagtttcaggcgcatttccggacgacggacgatcatgtcgatcgcgcctttctcgatcaggaattcactgcgctggaatccaggcggcagtttttcgcgaacggtctgttcgataacacgcggaccggcaaagccgattaacgctttcggttcagcgatgttgagatcgcccagcatggcgaaacttgcagaaacaccgcccatcgtcgggtcggtcagcacggagatgtacggcaagccgcgctcctgcatttttgccagtgccgcagaggttttcgccatctgcatcaggctcatcagtgcttcctgcatacgtgcgccaccagaggcggagaagcagatcagcgggcagttatcttccagcgcctgctcaacggcacgcacgaaacgtgcacccacaacagaccccatactaccgcccataaaggcgaactcgaatgccgcagcgacaaccggcattccatacagagtgcctttcatcaccaccagcgcatctttttcgccggtttctttctgcgcagatgccagacggtctttatacttcttggagtcacgaaacttcagcacatctttcggctcaagctcgctacccagctccacaaggcttccttcatctaacaggctatgcaggcgattacgcgctgtcatacgcatgtgatggtcacacttcggacagacctcaagattacgttccagctcagcgcggtataaaacctgaccgcagctatcacacttagtccacaccccttcaggaatgctcgccttgcgggtgggagtaatgttgcttttaattcgttcaatccagctcattagggacctttctgtctgaacctggttcgatgccagttttatctttggggacgcataatgccatttttgcccccaacagaccatgaatgttgcacattaaaacataacagcccgaaactttggataaaaaagtggtcgaaccgcggagttactttttattttgcggcgcgtgccgcagcgcgtttgtgacggattatttcgatgacgcccggcaaaatagaaaccacaataatcccgacgatcagcagcttaaggttatcctgaaccatcgggattgtaccgaagaaatagcctgcgtaggtaaaaagcagtacccacaacagtgcgccgatcacgttataagcggcgaaatgacggtagctcatgtggcccattcccgcaacaaacggggcgaacgttctgacgatcggcacaaaacgggcgagaataatcgttttgccgccatgtttctcataaaactgatgggttttgtcgagataactgcgacggaaaattttgctattgggattactgaacaacttttcaccgaacaaccgcccgatagtgtaattgaccgcgtcacccacaatcgcggcgatcagcatcagcaccaccatcatatggacgttgagatcgttggtttccagacttgccaacgctccggcaacaaacagcaaactatcacccggtaaaaacggcgttaccaccagaccggtttcacagaacaaaattaagaacaaaatggcataaacccagacgccgtactccgcgaccagctctgccagatgcacgtcaatgtgcaggataaaatcgatgaggaaataaatcaggtccatatttgcctatgccttgtactcgtcatctttcaggctgtaactacgttggctacagcctgaaatgttccgagcattattctcgttagtccgccagaaatagcgggcccattggcggttttggaagatcataccggtcagggtaatccaccgcgaccagatacagcccttccgcttttgccgttgctgccgccagcgttctgtcctttgccgccagcaactctgctatccagctctccggctggttgtgggcaccgacttccatcaggctgccgacaatattcctgaccatatgatgtacaaaagcattcgctttaatatctaccaccacataaggaccgtgacgcgtgacattaatatgcataacgttgcgccacggggttcgggactggcactgcaccgcacggaagctggtgaaatcattctcgcccagcaagcattgcgcagcccgatgcatccgttcagcgtccagcggttcgtaaaaatgggttacccctttactcagtaccgccgggcgcagccgatgattgtagatgatgtagcgataacggcgagccgtggcgctaaatcgggcatgaaaatcatcaggtacagttttaacccaacgcacagcgatgtcaccaggtaaattcgcatttacgcccaaggtccacgccgcgtctttgcgcagcgcggttgtttcgaaatgcacaacctgcccggtaccgtgtacccctgcgtcagtacgcccggcgcagaagacggtgatgggttcgttcgccacctgggagagcgccttttccagcttctcctgcacactgcggacttcgttctgccgttgccagccgtaatacttactgccgtcgtactcaatgcccagcgcaattttataaactggcggttgttgctggtcggacattagtacagatactcctgcaccagtttctcggcgatttttactgccatcagcgcgccgccaaagcgaacgttatcggccacgctccagaactggacttgctccggcataccgtagtcattacgcacgcagccaacagaaagatgcggcgtaccgctagcatcacctacctgagttgggaattcgttctcttcagagagcacaatatcttcgccttgaacaaacgcatcacgcgcttcttctgctgccagtggacgcagagcttcaaagttgaccatctgggcatgaccgtagaataccggtgcctggacgacgctagcgctaatcatcagcccttcgtcctgcaggattttgcgtacttcgtcaacgatacgacgttcttcacgcacgctaccttcgctatccggcagtaacggcagcatgttgaacgccagctgacgcccgaagaaatcttcttcgtcaatcggaatgccgttgagcaatttcgcactctgccccgctaacgcatcgaccgcttttttgccctgggcggaggcactaatcaggctggtaacgctgatacgacttaaaccgccctgatcgattaacggtttcagtgccgccagcagctggctggtcagactgtctggtacggcgatgacattccggttccggtaatctgtcagtacaaacgggtttacttccggcaccaccagcggtacgtcgggttcgagagcaaacaatccactgctgtcgatcaccaggcaaccactgttggtcgcttcttcaacccaggcagcggtagcttctttgcctgcgacaaaaaatgccagctgcgcctgcgtccagtcgaattcagcggcatcctgcacggtgattgtcttaccaccaaagcgcagttgttcgcctgcgctttcgttacgtgccagtgcataaatttccccaaccgggaactgacgttcagccagcgtttcaagcagggcttcgcccacagcgccagttgcgcccaggacggcaatgttccagccttcagacatggtggtttactccagaaatagcaaagctccctgccaatgttacagcagagagcatgaagaagagattaacgtgccggatgatgaacggcgttaaaacccagtttacacagcaaacttgccgcactggcgtcatcacaaattacatacagagaactccattcacggcgctcaagatagtttttgcgcagtttatcgaactcacccggtatcccggcgactttacgcagcggtgcgtcatcgcggcgcacatcatacaccaaatgcaccagccttttcagcgtcggttgatcgagcgggccatgcagcgtaatgcgaccaaactctggcgcaggcagtaatgtatccagcgcaacgtgctgttcatgcccaataaacttgctataagcttcaaacacttgcgtagtaccgcgtgctttaccttccagggtatagcctgcgatatggctcgtgccgatatccacttttttcagcagctcgacgttgagttccggttcgccttcccagacatccagcactacgcttaacttctggccttcattcaggcaggtcagcaacgcagtattatcgacgactgcgccacggcaggcgttaatcagaatcgctccgggcttcaggctacggatcagtttttcatccgccagatgtagcgttttgtacggaccatctttaaagagtggcgtatggaaagtcagaatatccgcgcgctggactaactcatccaggctgcggaaatcaccctcatccccacggtcggcgcgaggcggatcgcaaagtaaggttttaatccctaacgcttccagtcgcgcctgcaatcgacgtccaacgttaccaacgcccacgatccccaccgtacggtcgtacagactaaatccatcgcgttcggcaagcatcagcagggaggagaaaacatattccaccaccgcaatcgcattacagccaggtgcagcggaaaaaccaattcccgcctgcttcaaccatgcttcatcgacatggtcggtccccgcagtggcagtgccaacaaatttaatgggttttcctgccagcaaagattcattcactttcgtgacgctacgcaccatcagcgcatccgcgtctgccagttgagcgacggggattggacgcccgggaaccgcggtcacctcacccaaacggctaaataagtcgcgggcataaggcatattttcatcaacaaggattttcacgtttgtgttacctgtatgagacgagagttaaccggacaagtgtgccataatctcgcggccaggcatacttgcgaagatttcaggtataaggatacgtaatgatacaacctatttccggccctcctcctgggcaaccaccaggtcagggagataatctgccgtctggcacgggcaatcagcctttatccagtcagcaacgtactagcctggaaagcttaatgacgaaagtgaccagtctgacgcaacagcaaagagcagaactgtgggcgggtatcaggcacgatattggtctgagcggagatagtccgctgcttagccgtcacttccctgccgctgagcataatctggcgcaacgtctgctggccgcgcaaaaaagccattctgcccgccagcttttagcgcaattaggggagtatttacgtctggggaataatcgtcaggcggtcacggattatatccgtcataactttggtcagacgccgctgaatcagctcagtccggagcaattaaaaaccattctcaccctgttgcaggaagggaagatggttattccgcaaccacagcagcgcgaggcgaccgaccgtcctttattaccggcggagcacaatgcgctaaaacagctggtgaccaaacttgcggcggcaacgggggaacccagcaaacagatctggcaaagcatgctggaactttccggggtgaaagatggcgagttaattccagcgaaactgtttaaccatctggtgacctggctacaggcgcgtcagacgctaagccagcaaaatacgccgacgctggaaagtctacagatgacgctaaaacaacctttagatgccagtgaactggcggcgttaagcgcatatatccagcaaaaatatggtctttctgcgcaaagtagcctttcttctgcccaggccgaggatattcttaatcagctttatcaacggcgggttaaagggattgatccgcgtgttatgcaaccgctgcttaatccttttccaccgatgatggacacgttgcaaaatatggcaacgcgtcccgcgctgtggatactgttagtcgcgattatcctgatgctggtctggctggttcgttaaccccgacgaaaactcagtatcgtgacaataatacccagcaccgcagagatcgccccggcaagaaatacgctagagtaaccaaacgtggtcgccagcattcccgccagcggcccggagacgccgagggcgatatcctgaaacgcggcgtaaccgcccagtgcggtgccgcgaacttgactggggacgcgtttaaccacctccacgcccagcgcaggaaagataaggctacatccggctccggttaacgccgcgcccgctaatgcgacccatgcacctggggcttgccagagcagcaacaagcccaccgtttctacaagcagagagacaatcgccactttcacgccgccaaaacggtccggcatccagccaaacatgacgcgcatcacgacaaatgcgccgccaaacgcggtaagagtaaagcccgccatcgcccatcctttgctggcaaagtagaggctaacgaaagtcccgataacagcaaaaccaacgccttgtagtgccagacctaaccctggtttccagataagcccgacaacgctccacaggcttggacgttctcccgccagggccggtactttgcgcactgtgccgttacaggcccacgccagtacgggtaataccattgtggtgatcgccagtgcggcaaaaccgtaatggctatgaatcaacaggccaagcggagcaccaacagcgagggcaccgtaaatcgccattccgttccaactcatcactttgccagagtgttttggccctacgatgcctagtccccaggtcagagcgcctgtcagtaactggctttcaccaaagccaagaatcaaacgcccgacgaccaacagagcaaatttgaacggtgcggagacaggcaaaatcgccgccagcagcaacgcgccgccagccagaccacaagctaacattccctgaagcgcgctacgttttgcaccatattgatcggccagtcgcccggcgtaaccacgcgtcagcaccgtagccagaaactgaatcccgacggcaatgccgaccatggtattgccatagcccagttcatgatgaacaaacagcgggataaccggcaacggcaaccctacggtcatgtaggtgagaaaaaccgcaaaagcgatgcggaagaggctaaaattggcagaagatcgtgtttcggtttggcttacagcagtcatgcattactccagaatgcagcgcaaggcgaggagtatccccgtctcatctctctggtttcagggttacggtgcgttggcaggatttaacgcgtacgtcttttcagaaggaaatcgacaaagcgggaagtttgcctggaactggcggcgattgtcaatgatgtgaaaaagggaaccatcaggttcccttttgcgttagtgccggaggccgcattggcgcgtaacgtcggatgcgacgctggcgcgtctactccgacctactgcgaattaatctttcagcttgcgcattaccagcgtggcgttggtgccgccgaagccgaagctgttagacataacggtggtcagttcgcgatcggtcgtttcggtcacgatgttcagacccgcagcctgctcgtccagctcttcaatgttgatgctcggggcgataaagccgtgttccagcatcagcagagagtagatagcttcctgtacgccagcagcgcccagagagtgaccggtcatggctttggttgcagaaatcgccgggctcttatcgccgaacacttcacggatagctgccagctctttcacgtcgccaaccggagtgctagtaccgtgggagttcaggtaatcgattggggtatcaacgccatgcatcgccatcttcatgcagcgtactgcgccttcgccagacggagcaaccatgtctgcaccatcagaggttgcgccgtagccaacgatttcagcatagatgtgagcaccacgcgccagcgcgtgttccagctcttcaaccactaccataccgccgccgccagcgataacgaaaccgtcacggtgagcgtcgtaagtacgggaggctttttccggggtgtcgttgtatttagtagacagcgcacccattgcgtcgaattcgcaagccatttcccagcacagctcttcgccgccgccagcaaacacgatgtcctgtttgcccagttggatctgctctactgcgttaccgatacagtgtgcggaagtcgcacacgcggagctgatggagtagttaacgccatgaattttaaacggggtggcgaggcaggcagaaacgccggatgccatcgctttggtgaccacatacgggccaaccgctttcaggccgcgcgggccgcgcattgcgtcagcgccgaacacctggaaacgcggggagccgccgccggaacctgcaatcaggccaacgcgcgggttattctggtaagcttccggagagaggcccgcatcagcgattgcctgctccatagaaaggaatgcataaatggatgcgtcgctcataaagcgcacaactttgcggtcaatgaggccagtggtatccagttttacgttgccccagacgtggctacgcatgccggaatccttcagctcctgagagaaagtgatcccactacgtccttcacgcagagatgccaggacttcctgctggttattaccgatgctggaaacaatgcccaggccagtaatcactgcacgtttcattcaatacctctgtaagtcgcacatagagtaagtttcgaatgcacaatagcgtacacttgtacgccgaacaagtccgatcagccatttaatagagaaatttgcgcagccttacacacatcgctaagatcgagccaccgcctgtaagacgagtaacttacgtgaaacactactccatacaacctgccaacctcgaatttaatgctgagggtacacctgtttcccgagattttgacgatgtctatttttccaacgataacgggctggaagagacgcgttatgtttttctgggaggcaaccaattagaggtacgctttcctgagcatccacatcctctgtttgtggtagcagagagcggcttcggcaccggattaaacttcctgacgctatggcaggcatttgatcagtttcgcgaagcgcatccgcaagcgcaattacaacgcttacatttcattagttttgagaaatttcccctcacccgtgcggatttagccttagcgcatcaacactggccggaactggctccgtgggcagaacaacttcaggcgcagtggccaatgcccttgcccggttgccatcgtttattgctcgatgaaggccgcgtgacgctggatttatggtttggcgatattaacgaactgaccagccaactggacgatagcctaaatcaaaaagtagatgcctggtttctggacggctttgcgccagcgaaaaacccggatatgtggacgcaaaatctgtttaacgccatggcaaggttggcgcgtccgggcggcacgctggcgacatttacgtctgccggttttgtccgccgcggtttgcaggacgccggattcacgatgcaaaaacgtaagggctttgggcgcaaacgggaaatgctttgcggggtgatggaacagacattaccgctcccctgctccgcgccgtggtttaaccgcacgggcagcagcaaacgggaagcggcgattatcggcggtggtattgccagcgcgttgttgagcctggcgctattacggcgcggctggcaggtaacgctttattgcgcggatgaggcccccgcactgggtgcttccggcaatcgccagggggcgctgtatccgttattaagcaaacacgatgaggcgctaaaccgctttttctctaatgcgtttacttttgctcgtcggttttacgaccaattacccgttaaatttgatcatgactggtgcggcgtcacgcagttaggctgggatgagaaaagccagcataaaatcgcacagatgttgagtatggatttacccgcagaactggctgtagccgttgaggcaaatgcggttgaacaaattacgggcgttgcgacaaattgcagcggcattacttatccgcaaggtggttggctgtgcccagcagaactgacccgtaatgtgctggaactggcgcaacagcagggtttgcagatttattatcaatatcagttacagaatttatcccgtaaggatgactgttggttgttgaattttgcaggagatcagcaagcaacacacagcgtagtggtactggcgaacgggcatcaaatcagccgattcagccaaacgagcactctcccggtgtatagcgttgccgggcaggtcagccatattccgacaacgccggaattggcagagctgaagcaggtgctgtgctatgacggttatctcacgccacaaaatccggcgaatcaacatcattgtattggtgccagttatcatcgcggcagcgaagatacggcgtacagtgaggacgatcagcagcagaatcgccagcggttgattgattgtttcccgcaggcacagtgggcaaaagaggttgatgtcagtgataaagaggcgcgctgcggtgtgcgttgtgccacccgcgatcatctgccaatggtaggcaatgttcccgattatgaggcaacactcgtggaatatgcgagcttggcggagcagaaagatgaggcggtaagcgcgccggtttttgacgatctctttatgtttgcggctttaggttctcgcggtttgtgttctgccccgctgtgtgccgagattctggcggcgcagatgagcgacgaaccgattccgatggatgccagtacgctggcggcgttaaacccgaatcggttatgggtgcggaaattgttgaagggtaaagcggttaaggcggggtaatctgctctcgcagtgtttgccggatgcggcgtgaacgccttatccgacctacgtgtgacgtgtaggcctgataagacgcgataagcgtcgcatcaggcatgctgctccagacgccgcaacttactgctgactcgcctgctgaaacaggttttcccacatatcggtcaccagcgcctggtcacgcgggctcaattcaccagcaccaatggctttttccagactctggctaacggtcgtatgcaccgcctgagcggagtggtcatcaccactttccagttctgcgatggctaatgtcaggtggccacgcaaatacccactggcaaacaactcatcatcactggcatggtcaaccataccgtcgattaatgccagaatgcgactttcaaactccgcgatcatcttctttcctcattgtaaaacgtggcgctggcttcagttgagcgcttccggccacgggaactgttccgccgtaagttccggcgtgtgataataattttgtagtgctttaatgaagcgtgccggacgttccggaatgccatttgtcagataatccatcacctgcgcatgtactcgccgttgaaacaccacacgatccggttcgaaatccccttccagattgtcgcaactgacgttaaacggatatcccgccgccacacagaacaaccagtcgagcgcctgcggcttcacttcaacatcttcaaactggctttgcgtttgggcatcgcgtccgtccgggcaataccagtagccgaaatcaaccagctcacggcgcgctttcccggcaatacaccagtggctaatctcatgaattgcgctggcataaaagccatgagcaaagacgattcggttatacggtacttccgcatcagcaggaagatagatcggttcgtcgtcgcctttaatcagacgggtattaaaatcatcggcaaagcagctattaaaaatttcaatcaactgctcgtagtggtgtgtactgttcattagttcatccccaaccagtggaggatctcctgtccgtggctgtcgtaaagtaatttggcactcatcaccgcgctgacgataacaatcatcgggcggatcagcttttgtcctttgctcaacaccagtcgactacccatgcgcgcgccgaggaactgccccaccagcatgacaaagcccgtcgcccaaatcactttgccgccgagaataaacagcagtaaaccgccgatgttactcgttgcgttgagtaatttggcgtgagccgtggctttggcgaggttaaatccgcacagcgtaacgaaggccagcgcgtaaaagctcccggcagccgggccaaagaatccatcataaaaaccgacgcagccaccggctattaacgcgaagggtaaaccgtacatccggcgctggcggtcttcttcacctagctttggcatcagcaagaaatagaggccgatacaaattaccagaatgggcaaaatctgccgtaagacatcagcctgaacgtattgcaccagcagtgcgccgctcatactgccgacaaaggtcatggcgatattgagtttctgatcgcttaaactaaccactttgcggcgaataaagtagatagtagcggaaatagagccgccgcaggcttgcagtttattggttgccagcgcattagcgggagacatccccgctgccatcaatgccggaatggtgagtaacccaccgccaccggcaatgctgtcgataaatcccgccagcatggcgacaaaaaagagaactcccagcaacagcggggaaaccataaacaggctattaaacgtttccattagatcacgtgctcatccagtagcgcctggcaggaaggcggcaacggaggcggtgtcttcttctcaggctttgttgttcccggttttggaggttcaaaccagctttgcagttctgccccgcaaccatcgccacttggcggtaaaggttgatcttcacactccagactatcggcagggcaacgtaatcgtacatgcatatgcgcgcgatgctggaaccagggtcgcactttgcgcaaccagtcgcgatcggtgcccgcatcaaggcaaagttgttgtttaatcgccggattaacaaaaatgcgcgtgacgtctttgtcctgggcggcgagtttgatcaagctgaaaatttctggcttccacagcgtggagacaacgtgtttaccgtcgcgggaaactaagtccagtgcttgcgggcgcaagagctgcgcggaggtccagcgagttttcggcagttgcagaaagatatcgacatccagtccggtctggtggctggcatgaccgccgttgaaacgcccaccagcgggcatccccatatcgccaatcagcaccgtacccatgcccagattgctcacctggctactcagacgctggataaacatcaccagatccgggtgaccgaaatagcgacgctgatcggtacgcatgacctgataatgttcggactgtatcggcagcgtgtcagcgccgacaatacagccattagaaaaactgcctatgctttgtgcgctacccggcacaggttgggttattttttgccacggcgtcgctgccaggctggcgctactggcaagcagagccagcagcgcaatcgcggttttattcattttttaccagcgtggaatatcagtcttcacatcggcattttgcgcccgttgccgtaacaggtgatccattaaaacgatcgccagcatcgcttctgcgatcggcactgcgcggatcccgacacagggatcgtgacggcctttggtgatcatctcaacttcttcgccaaagcggttaatggtacgacccggcacggtaatgctggaggtcggtttcagcgccatatgggcaatgatttgctgcccgctgctgataccgccgagaatgccgcccgcatggttgctctggaaaccgtctttggtgatttcatcgcggttctggctgccgcgcagcgccaccacgtcaaagccgtcgccaatttccacgcctttcaccgcgttgatgctcatcagcgcatgggcgatgtcagcatccaggcggtcaaagaccggctcgccaagtccggcaggaacgccactggcaacaacggtgactttagcgccgatggagtcgccctcttttttcagcgcacgcatcaactcgtctaacgcgtcgattttgtcggggtccgggcaaaaaaacggattttgctcgacctggctccagtctttgatatccagcggaatgtcgcccatctgggtcaggcagccacggatttcaataccaaatttctcggcgagatattttttggcaatagctcctgccgccacgcgcatggcggtttcgcgggcggaagaacgtccaccgccgcgataatcgcgcagaccgtatttttgttcgtaggtgtaatcggcatggcctggacggaaaacgtccttaatcgcactgtaatcctgagagcgctggtcagtgttttcgatcaacaagccaatgctggtgccggtagtaacgccttcaaaaacaccggagagaattttgacctgatccggctcgcggcgctgggtggtatagcggcttgtcccagggcgacgacggtcgaggtcatgttgcaggtccgcttccgtcagcggaatgcctggcggaacaccatcgacgatgcagccgagcgccagcccgtggctttcgccgaaggtggttacgcgaaagagttgtccaattgtgtttccagccatcacggctccgttattgttgtgtttgcgtgtttacttaatctttataaatcgcgaaatgttctcgtgcggcaataagctgctctttggtgagcataaacacaccatcgccgccgttatcaaactccagccaggtgaacggaacatccggatattgttccataagatgtaccatgctgttgccgacttcacaaatcaacacgccatcatcagcaaggtaatctgccgcgttaccgagaatgcgacgcgtcagtttcaggccgtcagtgccagatgccaggcccagttccggctcgtggcggtattcgtttggcaggtcggacatatcttccgcatcgacatacggcgggttagtgacaatcaggtcgtactgcactttcggcaagtcgcggaacagatcggaacgaatcggaatgacgttgtggatcagaccgtgttcttcgatgttctgttcagcaaccgccagcgcgtctggagagatatccaccgcgtcgacttctgcatccgggaaggcataagcacaggcaatggcgatgcagccgctaccagtacacatatctaaaatatgctgcggttgcttgctgataagtccggcaaatttattgttgatcagttcaccaatcgggctgcgcggcaccagcacgcgttcatcgacgtaaaattcatggccgcagaaccacgctttgttggtcaggtaagccaccggaatgcgttcattgacgcggcggatcacgcgttcaacaatacggtgtttttcgctggaggtcagacgcgcggtgcgcatatcttccggaatatccagcggcaggtagaggctaggcaacaccagctgtacggcttcatcccacgggttatcggtaccgtgaccgtaccagatatttgccgcgctgaagcggctcacgctccagcgcaacatgtcctgaatggtttgcagctcatttactgcttcatcaacgaaaattttatccacgtattcctccagggcatgatcgcaataatttcggcggctagtttgccatgaagatgacgataaatcagcattcacgcgcggtgagtgaggaaaaatacgtttaaaacgatcgattgcgctacgagtcgggtaaactgtaggaaaattagaaatagagacagataaatgaaaaagaaaacaacacttagcgaggaggaccaggctctgtttcgccagttgatggcggggactcgcaagattaagcaggacacgattgtccaccgaccgcagcgtaaaaaaatcagcgaagtgccggtgaaacgcttgatccaggagcaggctgatgccagccattatttctccgatgagtttcagccgttattaaataccgaaggtccggtgaaatatgttcgcccggatgtcagccattttgaggcgaagaaactgcgccgtggcgattatagcccggagttgtttttggatttacacggtctgacgcagctgcaggccaagcaggaactgggggcgttgattgccgcctgccgccgtgaacatgtgttttgcgcctgcgtgatgcatgggcacgggaagcatattttgaagcaacaaacaccgctgtggctggcacaacatccgcatgtgatggcctttcatcaggcaccaaaagagtatggcggtgatgcggcgttgttggtgttgattgaagtcgaagagtggctgccgccggagttgccctgaggagttgagcgcgttgcgccaggtacgggtaatggcaggggcgaatgcccctgcctggtgtatctaagggttacaactcattcagtatgtactggaaccggcaagtagaatcgattggctgcatactgctggtatcaacacgcacgaccatatcgtgtaactgtttgtccgttatagggtgtcgatttggcgtgacgctgacttccgccttgtcacatccgctcgcggtaaaagttatcatctgtgcaacccagcggcagtaaccacctgtttcattcatctgcgtactgtcgcacaacttcccatctttcatcaaatacgtactaagcgttttctcaaccacaccgcccgtgctctgcagggtgagcagtttactcttactgacataattctcattccaactaacgtcataaggttgaacagaaacggatggacaaatcgtgtcgtgactatcaggcccctgatacgtcacgccccctggagaggcttcagagtcattcataataaccaaccatggacaagaaaagtaagattcaatctctgcagagacaataacctcaaatgtataatacccgcagttccacccagacggtaatccaggacaacttgctttgttgatattttgatggtagccaatcagcttaacgctaggggcaggaggaggaccactccagctcacattttgcaatatttccccagtcatgagccattgactacttttatattcaccaacgtacactgcggatggcatcattatttttaaattaaaagtcgcaatattacggctatcaccgttgtaaccgtagtaaacgtcaacgctatgcccggcagccatagcttctgtagtagcaataagcatgaccagagcgaacaaccatcgtagtattttcattttaaatatactcaaatgtcgcagttaaagaggcggtaaattcaccgatcgtcacatcacggccgcttttcgcctgtagccaggctctgaaattgatatcgttattgccattggttagcgcaaaggtcgccccatttgtattgttgatggcaacctgcattccgtcggttttttccatgccaattcccactccctgagcggtactactcgtatccagtgccagaaaaccgggttgttcgctgtcttctacccccgtgagcgtgacttttacgttgtatcccgccggccctttgcaatctttcagcttaaagactacgggtacacgagcggactggcctgcaacgttcaaatcctgacgactgaccgtgggaaagcgcacctctgccagatattggccatccaccaccagcgcacaggatttacttaataaattaccggagaaatgcagattattatctgccgcgaataacgtgctactcattgccaatatcagccccgctaacaggacgtaaccaccggactgaatcatacttttattcattgataatccacccgtaatgttgcgtaagcgctaaaattcgtatcgcttaacacagcatcactcgcttttaccggtacggcctccagcttcggcttttgcgtaaaatcagtggcgttgatagcaagcggagtattgagtttaaaacgctgaccatcgtgctgaagctcgataccaaaaccgggtacatcagtttcaattgctgcatcattaaaactggtttgtgtaccagtccaggtgagggtcatctcccaatctggatgacgggtcgtgctgtcacaagtgagttcatatggcacctctttacgaccatagttgccgttgatgtcgtcgataatgagatcgcgaaattcgacttcaatggttttaccaccgctgatgctacaggttggcggactcaataatgtcccgtgaaaggtgatgtcttcatcagcagcatgagctatggcgctactgacacaaagcagggttaagaaagtctttctcattgatagtccaccaccatggtcaaactggcgttaaactcgcccgcagcaagttgcgccccgcttgccttcacaggtacagccttcaactgtggctggttattgatattaaatggcgtccagctattttcaccgacggcaaacaaactgttatcggcgctattttctatccgaatgcccagcccggtgatattggtactgagtaccgtttcgccgttaatcgtactggtattgcccttaagttgcatccgcaagtcgttagcaagactgtttgtgcagttcaacgtgtatttcgcatcttgccgataattggtgccatcaacgttatcagcaatcatattgccgaactctacctggctgcccttgatactacagggtggcggagcatcgaccaacacgcgcagaattaaatccacgggtttactaccagccatagcagataaactacagacactgcataccagcagccctgcgcccactacaaacttttgactcataactccccccgtcatcagcctttgcggctctgctcttcatccacctggcagctgttgccattgcactggaagaacagcggcatccgtgcgccaaagtcgttgacgtaagtcagcaccggtacgctatccattttcacattcagcggtaccgtggttttcggctcaatgaccagagggctgaaccctgcagctggattaccgtttttctgcgcactggcgttgctgataatcacgtagtacggcgttgggttattgacggtaaatgcctgaccgctgcgggtgagcgtcaccttgtgctgccacggacttttcatactgaccttttccagcgcctttggtcgccagaacaacttgatacgcgtttgcagcgcgatttgcagggtattgggtttgttactttttggcgggatctcgcgcacgttaaagtagaacatgctttcacgatcggctggcaatttgttgatatccggcattccctgcacttttacctgcccgttcatcatactatcgatgcgttgcactggcggcagcacagttaacgggctggtgatcttgttacccttttcatcttcaatccagctttgagccagataagggagtttcggatcgttattacgcagcgtcacgctgatacttttgtcgctttcattaaatatcaaacgggtacgatctggcgttacagacgccagggcagacaaactggtagcgctaagcagtaacgccagcgtcatagcacccaatttggcagagcaaagtaaatcagacatggatcattccttaatcacgttattggttagcactaacagaaacagggggatcggtgggtgtcacctgttgcgtctgctcctgaatgacaggctttatgtcatcaggaacaaccggcgcgacgttgcctttatgctggcatggcagtaacaagccgttaaacagatcggcaggcagcgggtccggcaggttgatatcgcaatgcgcaacaccactccagaacacactcatatgttcgccaggtttcaccccagccagatagacactaccgtcatcatcgacaaggcccactgtctgctcgttatcattttttacttctgcgccaaacggtggatggctgccatcttgtaaacgcagcaccgccatcgctttttgaccactgatgacggcaaatttgcggtagccaatggctccttcagttagcgtggcttgcaccacgctctgggttgcttcggcgttttccggcaatttgttgaggtcgatatacgcctgattgcgataataattgttaacgtcagaaacgacggctttaccaaacatattggtataaacagcagccccgttaccttccaccggaacatcggcaacgccatcggcatcaatcagcaggcgtgtcccgcccatattctgggtacggtgaagtgcgccgccgtgggtagtaagcgttgcgccgccctgtaagctcaagcccgcagaggtgtattgcccttcatggtagttcgcactgaggtcaacctgcgccaggctaccatcatggctgtagtagccatcaacgctggtgtgtttgtcactggtgccgatgttcaactgatagtgagtcgcgtcatcgacacggctaaaataaccgacctggctgctgtccgtcccactgccatagttgccgttatagctaacggtactgttgtcgccccacggcatactgagcgaaatttacatgcccttatccgcccggttgtcatactcgtagcggtagccagtcagggaaacgctcatattacgaatgctgcccatattgaaatagtgggagagcatgatgttgtagtttgtctgctcctcacgatcccagtaggtatggcgggtatagttgagataaacgctaacacccgcatcgcggaagttctggttataagtggcggtgtacatctctttgtcgttgcccgtacggaccatttcgctgtcactggcatccagatactcgctcatggtcataaagttctcttcgctgaagcgatatccagcgaaagtgacgcggctgttgagctggtcaaagtctttggaataactcacacggaaggagttaccgtccaggctacctttgccataagcggtgtctttatccagtttggtatggctatgagtaacatcaaacgcgaccgcgccgaaggtagacaaatcgcgaccgacgcccagcgccgcagactgatagttttcatcacccagcgcaccgccatataagctccagccgttagcgatgccccaggaggcttcagcaccagagaaaaatcccccctcgacatggtggccccactcttgcggacgtcccatcatgatcttatagcgaacctggcctgggcgagtgaggtatggcatgctggcggtgctgatgtcatattcctgcacctggccgttctgttcttcaatgcgaatatgcaacgtaccggagacggaatcaccaagatcctgaatacgaaacggtccagccggaacctgcgtttcgtaaatcacacgccccatctggctgacggtcacttttgctgtggtgtgtgccacgccggaaatgtctggcgcgtagccgcgcagattgggaggcaacatttgatcgtcagtgctgacactgccaccaacataattaaaaccgtcgaaaatatcggaattgaggtaatcttcgcccagcgccagtttggcttttaaactcggtaacgcccgccaggcataatagcgactccactcccattttttttgtgtgtcatcgccgccaaattcatcgtcatcatcattactgcgcgtatgttgatagttggtctgccagtcagcgcgcatacgccatggccccaggttaaccccgaccgtcccgttgccgctgatctcgttactgtcatcgccgccattttcttcgtgtcgtgtttgcgcagtgatgctgtagtccgcaatgatcccggagatgccatcatcccaacgagaaggtggatcccagtcgggccaggtatattcgaggtaagcctgcggtagactaatgactaatgcggactggcttaaatcagccttaatttccacgccttccagttgaccgggcttcaggcatttaccatcgtggctccattgcagatttttcgccacgtcttcttttaaaccaaactgcgccaccagttccggtgtcagacaagcatagcttttgctaacgtcatcttcaccagcataccagtaaatatcgtactcttccgccaatggctgtttatttagttgaacctgtaaattgtattttccgggctcaacatacccctggctggaaaaacgcttcagatcaatttttgtgtcgccttttaattccagaaaacgggaatcaaactgaatgtcgtcttcagcccagacactgctataactcccactcattgccagcgcaatgcaccacggaagaatccgtaatcgaaaaagagaatggtcaggcatacacgtttttatccgtttttattcttgttcggtcaaaatccatttaaataccccatagcagtgtcgctatgggggtatgccttacaggtaagtaatctggaaggtggtatttgcttcgaaattacccagatctggcgcatcagctgcgccgaccagccaggctttaaagttcagagtctgcttcgctttgcctttattagtggcagtatctttcacgattttctggtcaatacccatgccgcttttgtaagaggtacccagagagtcaccgatcgccaggctaacattgttaaatgccgcaccggtatcggtattgaaaatggtgtaataattgccgctatttgcagaagaaacggtaccagtaaaggtagtggtcattgtttcctgagtatcaaatacgcaatcttgcaggcgaatctggaaatttttcggcgtggtggtgccgttatttttcagtttttcggcaccgatatcacccatatcaacttccagtttgtgatcgtccggaacgatagaacacacactgtcttcaatggtgccgtaaaaacgtgcagtaccgttgttacccgcagcgattgttgccgtagaggtgaacgcgcccatcaccattgccgcagcaatagctgttttaacaaacttactcattatttgtccttaaactataaataattaaaatataaacattgcaatacattgattcagtcaatagccaatgtttatacccagccattgaatacggcatgcgatccaaaaaaacaggtcgtaaaaaatgtattcgttggtgtggggtcgaatagtgatgttttcactcccctgattcaatttaattttactaatgagtaaatgtagatttaattaatatattgataggggaaagattatcttaaggatcttctaaaaaaacacgaaatatatatttagaaaaaacaggaagcatatcaacaatgaatgccaatagcttaaaaaacaaacaatgaacatataatgcgattggcattaacccgcttttgtcgatataatatataaacactatagccagaatttaatcaagtttcaattacgtcctgcctgattattcaactctattttctccattatctgtattaataaatgataatgagtgtcaaacagacattattcatttcaacatgtaactttgggcaaaatcaagatacgcgcagaagaatactttccgaatgaaagttaaaggtgttttatttatagatggggagagtcttcgatagtagtgaggttgacagatatccgctgcctgatgagcaattatgcccaatgaatctacctcattgggcataatttggaactcatcagatagcttttgccatcttcagattacacgggctcatctgccagttgaatgtgccgtttccgctttcatcaagcgttacgctggcaatggcgctggtggtaaacataggcggcgtttcgcccggacataactcggcaaccagatacccgactaacggtaagtgagagatcaccagtacgctagcaacaccttcattggtcaacgcctgcaaataggcactgaccagaccaacatcgccgcagggcgttaactccggcagaacttctgcactggaaggcaggttcagacaatcccctacttcttccagtgtttgctcggctcgcaggaacgggctcaccagaacgcgttcgatttccactttttgacctttcagccagttcgccatcaggcgagattcgtcacaaccattagtggtcagaggacgaacggaatcactggcggcatcgagggctgcgtcgccgtgacgcatgataaaaacttgcatattgcaccgcttttgttaaccagattcgcccgttttctttcatctgaaaccagagaaagaaaacggtggccggcattgtgccttatccattcaccgaatgaaacgctgttttttacctcaatggcgtaagtatagtcaatatgcgtttacattttgaccaacactccgccattcagcgcggattcatatagctttgaccttcttattgcaggtcagttgcagttgttttccaaaaactttccccacgcgcgcccatctcgaccaaacgctcgcaaggggtaaaacgggaaccatactgcgtggcaagtcgttgcattattgcaaccacttcgcccgcgccgagagaatcgatatagcggaacggtccaccgagaaatggcggaaaaccaatgccaaataccgcgccaatatccccgtcacgcacgctacggataacctgctcatcaacacaacgtactgcttcattcagcatcaacatcacacaccgttcagcaacctgcggtgcggagattcgcccctgcccttgtgtgccaatcagcgggtaaatggcgggatcgacctgttttttgcttttacgccctttctgaccataaagatagaaaccccggccattttttctgcctttgcgatcgtcgttcaaaatactagaaacaacatttgcaggcgcgctaaaacgttctccataagcggcttccagtacaggaataattttagtcccggtgtcgattcctacctcatccaaaagttggattgggcctaccggaaaaccaaatttcactagcgcggcatcaatgtgctctacccgttcaccttgggtcaacatgcggatagcttcattaatgtaaggcgctaagatgcgattgacgtaaaaaccggctttgtcacgcacgacaattggcgttttaccctgttttttcgccagttttactgtggtagcgatggtttgcgcgcttgtccccgcatgaggaataatctccaccagcggcattttttccaccggactgaagaaatgcaggccgataacttgctcaggtcgcgtggcgtgagcggcgatatcaccaatcggtaaagaactcgtattgctagcaaagatggtatgagcggcgcaattttgctcaacttccgccaccatctgttgtttcaattcgagattttcaaacaccgcttcaataatcagatcgcgatgggcaaagccgcgatagtccgtcgttccggagattaatgccagctgtttgtcacgttcgctggctttgagatgacgacggcgaactttgccctccagctgatcccaactgtacttcagcgcatgatttatgccctgcgggttgatatctttaattctgaccggaatccccgctttacaagcagtgacataagcaataccgccgcccatcaagccaccacctaaaatccccacgctgtttaatggcgcaggcggcgcatcactgccgggatctttcttcacgtccgtactggcaaaaaagatactacgcagcgcctggctttgtggcgtcatcgccagttcgccaaacgcccgagcttcggcgtcataaccgctgctggtgccctgcgctaatcccgtttcaacaacctccaggatgcgttctgtcgccggataattgccttgagttttgtgttctgttttcttgccgaccattttgaacagcagcgcacgacctaacggccccgccagaatacgctcgcgtacaggtagagggcgggaagatgggcgctccttctttgccagctcaacagcggcttccagcagaatggagtgcggaacaacgtcatccaccagccccagctttaatgcctgtttcgcccgaagttgttttccggtgaggatcatctctaatgctgtgctgacgcctatcagacgcggtaaacgctgggtgccgccactaccgggtaacaatccaagttgtacttcaggcaaaccgagcaccgttttaggatcgtcagtacaaacgcgaccgtggcacgccagcgccaactccagcccaccacccaggcaagcgccatgaatagccgcgataacctgaatgggcaaagcatgaatctccgccatcaactgttggccctgccgcgccagagcttccgcttcttgcgccgttttgcagttgccgatcatgttgatgtctgcgccagcaatgaagttgtccggtttagcggagacaaacaccacgcctcgcaactctttgttttcacggagttgcttaataatggcgcgcacctggctggcaaactccgccttcagggtattcattttctcacccggtacgtcgatggtgataacggcaatgttgtccagacgaacattaagggtaaacgcacttgtcatttccattattccgcctccagaaccattgccgcgccaagcccaccggcagcacaggcggtaactaaaccaaatccaccgccgcgacggcgaagttcatgcaatgtctgggtaatcatccgcgcgccggtcgccgcgaagggatgcccgtaagcaatgctaccgccaagcacgttaaatttgctatcgtccacttcgccagtggcatgtgcacgccccagtgcttcacgagcaaaacgttcactacccagcaactgaatattcgccagcgtctgagctgcaaaggcttcgtgcatatcgatcaatgtcagatcgctcatcgtcaaaccggcacgctccagcgccagcggtgtactccaggctggaccgagcaacatgtcctgccagacatcaatcgcagtaaatgcgtagctgcgcagataccccagcggcaccagccctaattctttcgcccgggattcagtcatcaggatcaccgctgccgcgccatcggtcagcggcgtactgtttgccgccgttaccgttccgtgtttgcgatcaaacgccgggcgcagctttgcgtaatcggcaaggctggaattaccgcgaatattgttgtcttcgacaagcggttgtttataaggagggataaaggcagtcatcacctcttctttgagttttccgtcactccatgcctgagcggcacgctgatggctacggtgcgctaatgcatcttgctgttctcgggtgatgccgtaggttttcgccatttgctctgcggtgtcgcccatccgcaagccggtagaatattctgctaccgcaggtggtacgggcattaagtcgcgcaaacgcaggcgagagaagagtttcagtcgctggctcatggtacgagctttgttgacatcaaccagcacgcgcgccagttttttactgacgccaattggcaatacgctagaggaatctgccccaccggcaatccccgctcgaatagttcccgccatcaggctttctgcgacgtttgcaactgcctggaaactggtagcgcaagcgcggctgacgctgtaagcatcggtatgtacattcattcccgtaccgagaacaatttcacgcgcaatgttgggggcttcaggcatttgtacgacctgaccaaagaccagttgttcaatcacttcggcggggatctcgctgcgtgccagcagttcgcctaccaccatcttccctaaatcaaccgcgggaatgccatgaaaagccgtcgcctgacgggcaaaaggcgtacgtaaaccgctaacaatggcgatacgatcgccctggcgggtaaccagcggtaaaacctgacccataacactcccctgtaaaaaaataaataaagtggtctgacctgatcatagtcttaaccatttttttacatttagccaagtggagaaaagggaaagtgggagctatgacacagagagaaaagaagaagagaaaagaaaacgcccctgccagcaactgacaggggcgtacgtacccgagaggaattaacgcagacccagctggaaaatcagcatttcagcttcgcaggcaaaagtgaaatcgatatccaggcgcacaccgtcagactcttcagtgaaagtcggggtgattttgcaaggttcagattccacgctacgggctttttcagtcagcgccgccagcgtttgctctgcttctgcgcggtttgcaaacacgcggctgtaagacgcggtgcagtcggagttgtccataatggtgccaacatccatacagcagcaaaccggggtttcatcagcactacatttactcatcgttgatttcctctgtatgtgcacccaaggtgccagataaacgttgtggatattttacgcttccggaaagtgctgctccagttgttaattctgcaaaatcggataagtgaccgaaatcacacttaaaaatgatctaaaacaaaattcacccgaatccatgagtgcgccacctccaaattttgccagctggatcgcgtttcttagatcatatttgaaaaaagatagaaacatacttgcaacattccagctggtccgacctatactctcgccactggtctgatttctaagatgtacctcagaccctacacttcgcgctcctgttacagcacgtaacatagtttgtataaaaataaatcattgaggttatggtcatgagccagaaaaccctgtttacaaagtctgctctcgcagtcgcagtggcacttatctccacccaggcctggagcgcaggctttcagttaaacgaattttcttcctctggcctgggccgggcttatagtggggaaggcgcaattgccgatgatgcaggtaacgtcagccgtaaccccgcattgattactatgtttgaccgcccgacattttctgcgggtgcggtttatattgacccggatgtaaatatcagcggaacgtctccatctggtcgtagcctgaaagccgataacatcgcgcctacggcatgggttccgaacatgcactttgttgcaccgattaacgaccaatttggttggggcgcttctattacctctaactatggtctggctacagagtttaacgatacttatgcaggcggctctgtcgggggtacaaccgaccttgaaaccatgaacctgaacttaagcggtgcgtatcgcttaaataatgcatggagctttggtcttggtttcaacgccgtctacgctcgcgcgaaaattgaacgtttcgcaggcgatctggggcagttggttgctggccaaattatgcaatctcctgctggccaaactcagcaagggcaagcattggcagctaccgccaacggtattgacagtaataccaaaatcgctcatctgaacggtaaccagtggggctttggctggaacgccggaatcctgtatgaactggataaaaataaccgctatgcactgacctaccgttctgaagtgaaaattgacttcaaaggtaactacagcagcgatcttaatcgtgcgtttaataactacggtttgccaattcctaccgcgacaggtggcgcaacgcaaagcggttatctgacgctgaacctgcctgaaatgtgggaagtgagtggttataaccgtgttgatccacagtgggcgattcactatagcctggcttacaccagctggagtcagttccagcagctgaaagcgaccagtaccagtggcgacacgctgttccagaaacatgaaggctttaaagatgcttaccgcatcgcgttgggtaccacttattactacgatgataactggaccttccgtaccggtatcgcctttgatgacagcccagttcctgcacagaatcgttctatctccattccggaccaggaccgtttctggctgagtgcaggtacgacttacgcatttaataaagatgctagtgtcgacgttggtgtttcttatatgcacggtcagagcgtgaaaattaacgaaggcccataccagttcgagtctgaaggtaaagcctggctgttcggtactaactttaactacgcgttctgataacgcgttcgcctggataaagtcacctgcatagcaggtgactttaactcccccacttcaccgaaagtagtgtcctcattgcttacctcctgagttttgcaaacagcctgttggcagcttgccctttcaaatcaataagcggtatccacagacaaacctgaagggaaaggcatattttcaggcgttctgctcgtccttctcaaagagtttacttttctgcatttccaggatactcccccccccctggctattgtgcgctcatacactcaaattaaagataggttctaaataaatgagcgttttttgatagtctatttcattaggtaatatatatttgtaacaaatcaatcaaaatggaataaaatcatgctaccatctattagtatcaacaataccagcgcagcttacccagaatccatcaatgaaaataacaatgatgaagttaatggattagtacaagagttcaaaaacctttttaatggtaaggaaggaataagcacctgtattaaacatctacttgagcttataaaaaacgccatacgagtaaacgacgatccttatagatttaatattaataattccagtgttacttatattgatattgactccaatgatacagaccatattactattggtatcgacaaccaagaaccaatagaattacctgcgaactataaagacaaagaactcgtccgtactatcattaatgacaacatagttgagaagactcatgatatcaataacaaggaaatgatcttcagcgcattaaaagaaatatatgatggagatcctggttttatcttcgataagataagtcacaaactcagacatacggtaacggaatttgatgagagcgggaaaagcgaaccaacggacttatttacctggtacggtaaagataaaaaaggcgactctctcgctattgtaattaaaaataaaaacggaaatgattacttatctctcggttactacgatcaggacgactaccacattcaaagaggaattcgtattaatggtgatagtctcacccaatattgtagtgaaaacgccaggagtgctagtgcgtggtttgaaagcagtaaagctatcatggcagaaagttttgcaactggttccgatcatcaggttgtaaacgagctcaacggggaaagactgagagaaccaaacgacgtttttaaacgttatggtcgagcaataagatatgattttcaagtggacgatgcaaaatataaatgcgaccatctaaaagaaatagtttctactttagtcggtaacaaaattaacgttggccattctcaaaaaatatataagcattttaaggatctcgaaggtaaaattgaagaaaggcttcaaaatcgccaggctgaatatcaaaatgaaattaatcaaccatctgcgccaggtgttaattttgatgatatttaaaattatttttccagttttttgatttttcaacagctgaatatcggaaatagtcagtgacgaacatcagtatttttacataattacgtctaggtcattgtcggtttatctccttttacttgtggtaattgagggataacaacaaaaaaggtgagttttgcgactcaccttttttatttgtttcttattcagaatcaatatcttttaaatcatcctgaatcgcttgtgcgttcggattttcctgcggtttgagttcgccgccattagcgatgaaatcatgacgctggaagtacgcttcgcgcaccataatataaggatcggagctctgacgcagcagaccatcggaatccagcagctgagcgcgggtttcgatcccttcaagcgtccatttacccacagacatcggccaggtcagccaggaaagaaccgggtaaaaaccatccgccatatcaccaccgtcatcacgcagcgtgaagctaccgtagaacggtaactgaacgtaaggcccataacccacgccataatgaccaagcgtactaccgaagcggtgaggttcagtccgttgcagtttcgggttcgccatccctgcaacatcaataaaaccgcccatccccaaaatggtgttcaggaaaaagcgggtaaagtggaccatcccctgataagggtcgccctgcaagaagtagttaaccatcaccgcaggttcttcaaggttgccagtaaagttgctcaaaccgttacgcgccggttgcggaacataatcacgccaggcgacagcgaccggtcgaacaatatacgggtctaatacattgaagttgaagttgtacatggtgcggttgaacccttctaacgggtcagaacgcccttgctgatctgtaccggaactcgcacaccccaccagaagcgtagttcccagagcaagcgcgctcaggcgaagcttcataaatgtctccctgtttttttatggcttatgcagtttgccatccatgacggaacgataccgtatccgcctgtttaggtgtgggcgattgtaacagcacgtcaactgatgtccagacgccctgatttgctgatttgatcatagcctggtaatcgccgccctgtaggctacttgattctatagaaacagaaaaaggcaaacgcagccttttctacattttcagagtaactcccgtcagttgcgagcaaaaaagccgctacgctttagctatacgtgctaattcaagagaagagaccatggacaacgacaaaattgatcaacacagcgacgaaattgaagttgagagcgaagaaaaagagcgcggcaaaaaaatagaaatagatgaagaccgactcccctcccgggcgatggcaattcatgagcatatccgccaggatggtgaaaaagagctggaacgcgacgcaatggcgctactgtggagtgccattgcggcgggtctgagcatgggcgctagcttactggcaaaagggatatttcaagtcgaactggaaggtgtgccgggcagcttcttgctggagaatctcggttatacctttggttttattatcgtcattatggcccgccagcaattatttaccgaaaataccgtgactgcggtactacccgtcatgcaaaaaccgacaatgagcaacgtcggcttacttatacggttatggggcgtcgtgctgctgggtaatattctcgggacaggtattgcggcgtgggcatttgaatatatgcctatcttcaatgaagaaactcgcgatgcatttgtcaaaatcggcatggatgtgatgaagaacacccccagcgagatgtttgccaacgcgatcatttccggctggctgatcgccactatggtttggatgtttcctgcagcgggtgcggcaaagattgtggtgattatattgatgacctggcttattgccctgggtgacaccacccatatcgtggtcggttctgttgaaatcctctatctggtgtttaacggtacgctgcactggagcgatttcatctggcccttcgcactacctactttagcggggaacatctgcggcggcacctttatcttcgcgttaatgagtcatgcacagattcgtaacgacatgagcaataagcgtaaagcagaagcacgccaaaaagcagaacgtgcggaaaacattaagaaaaattataaaaacccggcataaatggcgagggtttaagcaatcgagcggcagcgtacttaccccgcactccattagcgggtatactcatgccgcattgtcctcttagttaaatggatataacgagcccctcctaagggctaattgcaggttcgattcctgcaggggacaccatttatcagttcgctcccatccgtaccagtccgcaaaatcccctgaatatcaagcattccgtagatttacagttcgtcatggttcgcttcagatcgttgacagccgcactccatgacgggtaaaaagtggataaaataattttacccaccggatttttaccctagagccatacagcctcacactcgatgaggcctgtcagtttcttaaaatatcctgatctaccatcgccgtcatagagcgtatttttattacctgatttgcaggttcgattccctattcggagatagcactcatgcaacacgaactacagcctgatagtctggttgatttgaaattcatcatggctgatactggctttggtaaaaccttcatctatgaccggattaagagtggcgacctgccaaaagccaaagttatccacgggcgagcaagatggttatatcgtgaccattgtgaattcaaaaataagctcttaagccgcgccaatgggtaaaatagcgggtaaaatatttctcacatctaaaaaacaccattccaatcaatcccctgctgcttcaagtagatgtctgcaggggacaccatccttgtgtttatccctaaaaccacataaaaaccgtaaattaaattcgaactagcaggccgaataaggcacaccaggaactcgtggttttattcattaactagtggtttttacctgttctcttagccagataataaacgcttcaatttttggccactgcctgcccggtaatgtggtgatgtaataatgctgatggcatttcaccgtcatatcgccaaacggcgcgacgagctcaccactggcaagccttttttgtaccaggcgttttcttcccatcgccaccccaatatgattcatcgcggcaataacagctaaatcagaacgatcaaagccaattccagaagatgtcggcaaattaaccgcataatgttgcgcccaactatgccattcatccgtaccggagtcgttgctccatgcctgtctgtcatggagcaacgtacagtgacacaggttaattaccgtgttggttaaagcatgtctttgagcgtattccgggctacatactggcaggatttcttcatccatcagaaagtgatgagtgagttgcgcactcggcgcatcatcaaagtagatcgccaaatcgattccggcacgttgcagattgacgttgtcattaccagtgagcacggtgaggctaatagacggataccggcgtgtaaagtcacctaatgcgggcaccaaccagcattgggcgatagagggccgggaatacagagttaacgttccgcttaactcctgatttttgatatcaagaatttcctggttcagggtatccaggctgctttttagcgcccaataaacacgtttcccctcgtgcgttaattccactttgcgatgggaacgaacaaacaactgaatgcccaattcttcttccagctgattgatacggtgacttaccgcactggggctcaggctcaattcctctgccgccagggcgaaggactgatgcctggcagccacttcaaaagtatgcattttacttaattgccagccgttaagcagccgatttcttatttcacgaaggggttccataatcacctcatttttcgcttaagtgtaaaaaaatagcggcaaaatttcagctatgagatgagctaaagtgaaccatatctcaattcaccttcatttttagatgtaaatcactccattgatgcaatttacctcatgtgaaaggcaaattttatcgtttgtcagcctgcgttgtttttttgtccaatatcatcaggttaatcacaggggaaggtgagatatgcactctcaaatctgggttgtgagcacgctgcttatcagcatcgtgttaattgtactgaccatcgtgaagttcaaattccacccgtttctggcgctgttgctggccagcttcttcgtgggaacgatgatgggcatggggccactggatatggtaaatgctattgaaagtggaattggcggaacgctggggttcctcgcagcggttatcggccttggcacgatactgggaaaaatgatggaagtatccggggccgcagaaagaattggtctgacacttcaacgctgccgctggcttagtgttgatgtcattatggtgctggttggcctgatttgtggcatcacgctgtttgttgaagtgggcgtcgtgctattgattcctctggcttttagtattgccaaaaaaaccaataccagtttattaaagcttgccattccgctatgtaccgcattgatggcagtgcactgcgtggttcctccacatccggctgctttatatgttgccaataagctgggcgcagatatcggtagcgtgatcgtctacggtttgctggttgggctgatggcaagtctgatcggtggcccacttttccttaaatttctgggtcaacgactgccctttaaacctgtacccacagagtttgcagatctcaaagttcgcgatgaaaaaacactaccgagtttaggcgcaacgttattcaccatactgctacccattgcgctgatgttggttaaaacgattgccgaattgaatatggcgcgtgagagtggtttgtatatcttggttgagtttattggcaaccctatcactgccatgtttatcgccgtgtttgtcgcctattatgtgttgggtatacgccagcatatgagcatggggacgatgctcacacatacggaaaatggcttcggttctattgctaatattttgctgattatcggggccggaggcgcattcaacgccattttaaaaagcagcagtctcgctgatacgctggcagttattctctccaatatgcatatgcacccgattcttctggcctggttagtggctcttattctgcatgcggcagtgggctccgctaccgtggcaatgatgggggcaacggcaattgttgcacccatgctgccgctgtatcccgacatcagcccggaaattattgcgattgctatcggtagtggtgcaattggctgcactatcgttacggacagccttttctggctagtgaagcaatattgcggcgctacgctcaatgaaacatttaaatactatacgacagcgacatttatcgctagtgtcgtcgctctggcgggcacattcctgctgagttttatcatctaagcgcaaagagacgtactatggaaaacgctaaaatgaacagcctcatcgcccagtatccgttggtaaaggatctggttgctcttaaagaaaccacctggtttaatcctggcacgaccagtttggctgaaggtttaccttatgttggcctgaccgaacaggatgttcaggacgcccatgcgcgcttatcccgttttgcaccctatctggcaaaagcatttcctgaaactgctgccactggggggattattgaaagtgaactggttgccattccagctatgcaaaaacggctggaaaaagaatatcagcaaccgatcagcgggcaactgttactgaaaaaagatagccatttgcccatttccggctccataaaagcacgcggcgggatttatgaagtcctggcacacgcagaaaaactggctctggaagcggggttgctgacgcttgatgatgactacagcaaactgctttctccggagtttaaacagttctttagccaatacagcattgctgtgggcagtaccggaaatctggggttaagtatcggcattatgagcgcccgcattggctttaaggtgacagttcatatgtctgctgatgcccgggcatggaaaaaagcgaaactgcgcagccatggcgttacggtcgtggaatatgagcaagattatggtgttgccgtcgaggaaggacgtaaagcagcgcagtctgacccgaactgtttctttattgatgacgaaaattcccgcacgttgttccttgggtattccgtcgctggccagcgtcttaaagcgcaatttgcccagcaaggccgtatcgtcgatgctgataaccctctgtttgtctatctgccgtgtggtgttggcggtggtcctggtggcgtcgcattcgggcttaaactggcgtttggcgatcatgttcactgcttttttgccgaaccaacgcactccccttgtatgttgttaggcgtccatacaggattacacgatcagatttctgttcaggatattggtatcgacaaccttaccgcagcggatggccttgcagttggtcgcgcaagtggctttgtcgggcgggcaatggagcgtctgctggatggcttctatacccttagcgatcaaaccatgtatgacatgcttggctggctggcgcaggaagaaggtattcgtcttgaacctagcgcactggcgggtatggccggacctcagcgcgtgtgtgcaagtgtaagttaccaacagatgcacggtttcagcgcagaacaactgcgtaataccactcatctggtgtgggcgacgggaggtggaatggtgccggaagaagagatgaatcaatatctggcaaaaggccgttaataacgtttcaacgcagcatcgcaatcctttccctgggtgagcgatgctgccgatggcgcagacttaagatccccggtcttacccgctataaccccctccttttatcatcacccaacgcctttcgctgtaaacggcggtttcgcaaaccaaaccaaaaccgtaagtaagataaaagcaatagccgccatacggaaaatctcatttgcagaaatagaaagactctgctgggttatttcattattaatttcattaagaactccactaaggctaccataatatttatccataatttgactgctactattaaacacggggttaaattgatcgatggttgctgtcaactgactatggtgtaagctttcgcgtcgtccccacagcgtcattgtcaagctcgtaccaacacttccactcaaggtacgaaaaaaattactcatactgctggcattggcaaatttattatctggcaagccactaaagctaatcgttgttaagggtaaaaagaaacaggcaacggcgaatccctgaaaaaactgcggcaaaatgatgcctgtaaaatcaatcgttggcataaatgtcacagaacgccagtaatagcaaaccgcatacatcaaaaaactaaatgtcactaacaaccgcatgtctattttgttgccataacgtcctatcaaaggactaattaatagtggcatgatgccgatgggcgcataagcaagtccggcccatatcgcattataccccatcgtttcctggagtaactgcggcataaggacgatcgctccagagtaaaataaatacgcgcatgtgatactcacaataccaatggtgaagttacgggacttaaacaaactgagatcaagaatcgggttctcactggtgctctcccaaatgactaaagagatcagagaaataacacttactactgttaatattattattgtactgctgttgaaccaatccagatcgcgccctttatcaagcataatttgcaagccaccaacaccgagcactaacagggtcagtcctggtagattcattttgaccggactagtctcagtttctcttcctttaagtaaggttaagcataatgtcaggacgataatccccatagggacattgattaaaaatatccaaccccagctaaagttatcacaaatataaccgcccaatatcggcccacatatcggagcgataatcacggtcatactccataatgccagagcaaatgttcttttttctggcggataattccttaataataaactctgactcagtggaattaacggccccgccattaacccctgaacgactctaaaaaatatcagcacatcaagattggtgcttaggctacacattaaactagacaggctaaaaaaagtgacactaagtaaaaataatcttaattcgcctattctttgtgccaacctgccagtaacagggatcgcaatggcatttgctacaccaaagctggtgataacccaggtgccttcgtctgtacttgctcccagaaagccagatattgtcggtattgcgacgttagaaatagtggaatccaacatttgcataaatgtcgctaaactcaatgcaatagtgacgcaccataacgtcccaccggttaatggtgccggagtacttttagtgattgccattaaagttgtccattatggctaataatgttgctaatttctttttctatcggactggtatcgataactaaagccttactggtataagccggcatggaggtcacggtactagccagctcaggcatctcggcaatgtcttcgttcttcgtatcaatagttgctgtcatgcttaaaccaatacgcaaggggtgttccatgagttcttttggatcaagagaaacttcaaccggtacacgctgaacgattttgatccagttccctgtcgcattttgtgcaggtaataaggagaacgcattgccggttcccatattgatccctgtcacccgaccatgaaacacaacattttcaccataaagatcgctgataatattgacgctttgaccaatccgtacatccgtgagttgtgtttctttaaagttggcattaacccacatttgacgtgccggtacgacagccattaagctttgtccggggctcactgtttcgccgacctgaacacttctctgggcaatatagccggtaaccggactcttaatatccgtacgtttaagcgccaaccaggcttctttagttgcatccgccgcttcaacgacttgtggctgacggtttaatggtgtgttcattactaaagctttattcgctttataagcctggatagcggcattcaatgccgctttgctacttattaacgtatctttggtatgctccagcgtttctttactaataaccccctgcttcgctaacggcactcgacggttataatcttctaaagattgttgatactgaatacgtgcactagcgacttcggcactgtattgtttatcctgtaagtatagtttattcgtttgccgaacaatatttgccagattatttttagctttattgagtgcgatagtggcatcagttttatccagactaactaaaatgtcaccttgtcgaacgtagttcgtatctttatgattaacgacagtgacactaccactgacttgtgcagaaattggatctgcattccccgtgacataggcgtcatctgtactaatcatgtcttctaattccatactccaataggcataggcaccactaaacgcaataaataaaactaccgccaataaagaaaagtattttcttctgttagaatgttttttattactattaatctgttccactattatctctcatttctcatagatgaaatttatgaattgaatgaaaagagcattcattcttcatatcaaacacagtgcatgtgttgcacattatcccaggaacgttggaggcctaatttaaatgaggtgcaaaaaaaacaacagaggactaaaccgtggcttttgcaatacaattcttacgcctgtaggattagtaagaagacttatagtgccaacttgaaactataaatcatcggtacaatccctgattttattgttgacatttcatttatgccgactatttatatggtatacttgtcgaattatcttaaaggaagctcagattttcttatttttattgagaaaatgagatgacgccttatgtctgtattactacagggagaagggagatgcttcattgcaaagggaataatctatgaacgcaataattattgatgaccatcctcttgctatcgcagcaattcgtaatttattgatcaaaaacgatattgaaatcttagcagagttgactgaaggcggaagtgccgttcagcgggtggaaacacttaagcctgatatcgtcatcattgatgtcgatatccccggagttaacggtatccaggtgttagaaacgctgaggaagcgccaatatagcggaattattattatcgtctccgctaaaaatgaccatttttacgggaaacattgtgctgatgctggcgctaatggtttcgtgagtaaaaaagaaggcatgaacaatatcattgcggctattgaagctgcaaaaaatggctactgctatttccccttctctctcaaccggtttgttggaagtttaacgtccgaccagcaaaaactcgactccttaagcaaacaagaaattagtgtcatgcggtatattcttgatggcaaggataataatgacattgctgaaaaaatgttcatcagcaacaaaactgtcagcacttataaaagtcgcctgatggaaaaattagaatgtaaaagtctgatggatctttacacattcgcacaacgtaacaaaatcggctaaccacatgaagtttttaccctatatttttcttctctgttgtggtctttggagcaccataagtttcgcagacgaagattacatcgaatatcgtggcatcagtagtaacaaccgtgtcacacttgatccactacgtctgagcaacaaggaattacgttggttagcgagcaaaaaaaatcttgtgattgcagtacataagtcccaaacggctacgttgttgcataccgatagccagcaacgggttcgtggtattaatgctgattatttaaatcttttaaaaagagcgttaaatatcaaattaacactccgggaatacgcagatcatcaaaaagcaatggacgcgcttgcagaaggtgaagtcgatatagtgttaagtcatttagttactagcccgcctcttaataatgacattgctgcaaccaaaccattgataattacctttccggcgctggtaaccacccttcacgacagtatgcgaccgcttaccagtccaaaaccagtaaatattgctcgggtagcaaattaccccccagacgaggtaattcatcaaagttttccaaaagcaacaattatctcttttacaaatttatatcaggcattagcatccgtcagtgctgggcacaatgattactttattggtagtaacatcattaccagcagtatgatttcccgctatttcactcactccttaaatgtagtgaaatattataacagcccgcgtcaatataattttttcttgaccagaaaagaatctgtcattcttaatgaagtactcaatagatttgttgatgctttaacaaatgaagttcgctatgaagtaagtcaaaattggcttgatacaggaaacctggcctttctgaacaaaccattagaactcactgaacatgaaaaacagtggattaagcagcatcccaatttaaaggtgctggaaaatccttacagccccccctattctatgacggatgaaaatggcagcgttcggggcgttatgggggacattcttaatattattaccttgcaaacaggtttaaatttttctccgatcaccgttagtcacaatatccatgctggaacacagcttagccccggaggatgggatataatacctggcgctatttatagtgaagatcgagaaaataatgttttatttgctgaagccttcataacaacgccttacgtttttgtcatgcaaaaagcgcctgacagtgaacaaacattaaaaaaaggaatgaaagttgccattccatattattatgagctgcatagccaattaaaagagatgtatccggaggttgaatggatacaggtcgataatgccagcgctgcatttcacaaggttaaggaaggtgaacttgatgctctggtcgcgacacagctaaatagccgttacatgatcgatcattactatcctaatgaactttatcattttcttattcctggcgttccgaatgcaagccttagcttcgcttttcctcgcggagaaccggaacttaaggatattattaataaagcactgaatgcaattcccccaagcgaagttctgcgcctgacggaaaaatggattaaaatgcccaatgtgaccattgacacatgggacctatatagcgagcaattttatattgttacgacattatccgttttattagttggcagtagccttttatggggattctacctgttacgcagtgttcgtcgtcgtaaagtcattcagggtgatttagaaaaccaaataagtttccgaaaagcactcagcgattccttaccgaatccaacttatgttgtaaactggcaaggtaatgtcattagtcataatagtgcttttgaacattatttcactgcggattactacaaaaatgcaatgttaccattagaaaacagtgacagtccctttaaagatgttttttctaatgcgcatgaagtcacagcagaaacgaaagaaaatcgaacaatatacacacaggtatttgaaattgataatggcatcgagaaaagatgcattaatcactggcatacattatgcaatcttcctgcaagtgacaatgcagtatatatttgtggttggcaagatattactgaaacgcgtgatctaattaatgcactcgaggtagaaaaaaataaagcgataaaggctaccgtagcaaaaagtcagtttctggcaacgatgagtcacgaaataagaacaccaataagctctattatgggcttcctggaacttctgagcggttctggtcttagcaaggagcaacgggtggaggcgattagtcttgcctacgccaccggacaaagtctcctcggcttaattggtgaaatccttgatgtcgacaaaattgaaagcggtaactatcaacttcaaccacaatgggtcgatatccctactttagtccagaacacttgtcactctttcggtgcgattgctgcaagcaaaagcatcgcattaagttgcagcagtacgtttcctgaacattacctggttaagatcgaccctcaggcgtttaagcaggtcttaagtaatttactgagtaatgctctcaaatttaccaccgagggggcagtaaaaattacgacctccctgggtcacattgatgacaaccacgctgttatcaaaatgacgattatggattctggaagtggattaagccaggaagaacaacaacaactgtttaaacgctacagccaaacaagtgcaggtcgtcagcaaacaggttctggtttaggcttaatgatctgcaaagaattaattaaaaatatgcagggcgatttgagtttagaaagtcatccaggcataggaacaacatttacgatcacaatcccggtagaaattagccagcaagtggcgactgtcgaggcaaaagcagaacaacccatcacactacctgaaaagttgagcatattaatcgcggatgatcatccgaccaacaggctattactcaaacgccagctaaatctattaggatatgatgttgatgaagccactgatggtgtgcaagcgctacacaaagtcagtatgcaacattatgatctgcttattactgacgttaatatgccgaatatggatggttttgagttgactcgcaaactccgtgagcaaaattcttccttacccatctgggggcttacagccaacgcacaggctaacgaacgtgaaaaagggttaagttgcggcatgaacttatgtttgttcaaaccgttgaccctggatgtactgaaaacacatttaagtcagttacaccaagttgcgcatattgcacctcagtatcgccaccttgatatcgaagccctgaaaaataatacggcgaacgatctacaactgatgcaggagattctcatgactttccagcatgaaacgcataaagatctacccgctgcgtttcaagcactagaagctggcgataacagaactttccatcagtgtattcatcgcatccacggtgcggctaacatcctgaatttgcaaaagttgattaatattagccatcagttagaaataacacctgttagtgatgacagtaagcctgaaattcttcagttgctgaactctgtaaaagaacacattgcagagctggaccaggagattgctgttttctgtcagaaaaatgactaaatagcggctcccacaatgttcaaatgtgggagctatttaccagcacatcttacatttaactactgaactcctggcgaatttgttccccatgctggtcgagcgttgccgctcccggcataacatgcgggtccgcgcagccgctgatttttatcggattacccggcatcattattcccccggcttcaatcaacatatttctcgcctgagtttgtggcaatttaatggcctcagccacacttaataacggcgcgacgggtacaccaacttcatgtattctggctaaccaaacttcagctgcctgcgtttttaacgtccgctcaatatattgtttaagaatagcctggttttgtacgcgtaaaatattgctgctaaatcggggatcattaaccagttccgtaagctccagtgcctggcataacgcagaaaaaagcttgtcattaccacaacaaatcgtaatcggcttatcctgagtattgaaaacatcaaaaggtgccatgtagggatggcgatttcccagacgttgtggactcttcccagttgcgatatatgccatcagaccatgctccagaaaactcagcgtggcatcaaacatcgctatatcgacatgcgcccctctctggctcttttcgcggccataaagtgcactcactattccgctgaataaatagacaccgccgcatagatccgcaagagatgtaccaacgcgcactggcggagcatcaggatatcctgtttccatcattatcccgctcattgcctgaatgatggtatcgtaggcaggagcatcttttagcggaccggtatgtccgaaaccactgctactagcatatatgaggcgcgggttgatttcttgaagcgtttcccaactaaaccccagtttttccattgtacctgggcgaaaattctcagctaatacatcagcttgtttgagcatatttataaatatacttttatcgtgatcattctttaaatcaagaaccacactctctttgccatgattaataaaactgtaatagagactctgtccatccacatagggaccaaatgtgcgggtatcatcaccatgacccggcggctcaactttaattacccttgcgcccatattacaaagaagttgagttccgaaaggtccattaaggacatgtgtcatatcgataactaataagccttcaaacggccctttgctttcattatttgtcatttgcttatgccttgaaaaaagccgaaggtgaaaagacacttcggcatttatgtaaaatcaataacatgattaattaactaaccagtcgactgacataaatccacaagggagccgtgacgacaaagcccagtacgctcacagccaaactcgctgtaccagtacgggtgtagacattaaaccggctggcaataatgattccggagaatgccggcggtaatgcgcctgccagtaccatcatctgcagatgttcgctgttcaaatgacatgccataccaacgagaagcagtgccagtggcatcagaatcagcttcaggaaggtgttataagcaatttcggcactgaactcgaatttatgtgcagccagagtcaaccccgcagcgaataccgctaccccactgttagccttcgcaatcagattaaaggttgggtcccatgctgccggaatttttaccccaaccaacaccaggatcgttgccagaacaggtgcccatactactggctcctttgccgcagaaattaatgcgctcagattactattcttcttaccatccgctccactagaaggattcagcaaatacagaccaataggaatagtaattgcgttaacaataatagaaataattgctaccactaaacctgtacttacggaatcaccataaataggatcgagaactgcaaaccccaggaatccaatggtaggactacctgcaattaatgcacatacagctgcttctgcatgggtacgtttaaaaaatttgtagcaaccgaaccaggagaaaaagaaacatccgacaataaccacaagacttacaagggtcagacgagtgtccgcaaaaatcatttccctgtttgcccgagtaatagatacaaatagagccgcaggaagcgcgtagtttaataccagtttattaaatgcccgagcttgatcttcactaaatgtttctcgtctgccgctaaaataacccaacagcatgattacgataataggcaataaatcgccaataaaaaatgttagcataatagtatttccgataagggtcccctcaccatcgcataatgagttggcaagaggagacgatgtcagtatttaattaccagcgacttgttttgggttaagtttggtaatatggccactttcagttcctgctgcagggtcgatgaccacattaataatggtcggtttgcggctctgaataccggtggttaaagcatgacgaagttcatctgtcgtggtgacgttatagccaacgccacgaaacgcatccattaatttgtcataccttgcatggtgcaacagatccgttggacttggtgcaccagcgccactgagatcaacaccgtctcctctgtagatgccgccattattaaaaataacgatcgtcaccggcaggttatatcgacaaatcgtttcaatttccatcccactgaaaccaaaagcactatcaccttcaatggcgacaaccggagaaccagaagtcacgctagcaccgatggcatagcccataccgatgcccatgacaccccaggtaccacaatccagacgacgacgtggtttatacatatcaataatatttcgtgcattatccagggtatttgcaccttcattaactaaataaatatcctggttctcgcgcaatacgtcgcgcacagcacttaatgcattaaagtaatttaatggttgagtatctgtacttaatttttcatgcattttttgtgcattttgctgcttgtggatatttaaaatatcgcgccataccagtggagtcgtaaatgtgttttgtttcagttctgccagcataccttgcatactggatgcaatatcaccaacgactggcacagcaatggggcggttgctgtcaatttcctgcggttcaatatccagttgaataaactgtgtatctgccgcccatccttttttaccgtgtgccaataaccaattcagtcgtgcaccaacaagcatgacaacgtcagcatttgccagggcaaagctacgcgcagctgccgcagaaagtggatgcgtatcttcaaggatccctttcgccatagacattggcaggaatggaatctgagcactttcaataaattcacgaagctgttcatcagcttgactatacgccgcgcctttgccaaggataattaatggccgttcagcttttgctaaaaggctaattgcgctagtgacactcttcgggcatggcaataatgctgggctcggattttcaactttaacaatcgtggttaacgcttcgtctttttccatcgtcgcggccaggacatttgctggcaaatcaagataaactccgccagggcgaccgcttacagagacccggatagcgcgtgccaatgcaatgccaagatcctgcggctgattaacgcgaaatgctgctttggcatacggttttgccgcattcatttggtccagctcttcataatcaccttgctgtaggtcgacgatcgcgcggtcgctggagccgctaatcatgatcatcggaaaaccatttaccgttgcgttggccaatgcggtcaaaccattgaggaatcctggcgcagaaactgtcaggcagatccccggtttttgggtaagaaaaccgcttgccgcagcggcatagcctgcgctctgctcatgacgaaaaccaatataacgaatgccttccgcctgggcatggcgtgccatatccgtcacaggaatacctacaacaccataaatagtgtcaatattattctgttttaatgcttcaacgatgatatgcataccatctgtcatttgaagttgatcactcatgattaataacctcgaaatttttataaattgggagccagaagcccccgttaatatcagatggcgtggttttgcttcattgcagcaatttcatcgtcgctataacccagctcctgcaatacagcagcggtatgttcacctaatagcggcgcagctttaatatccggcgtaaaggcagagaatttcattggacaaccaacggtcagatattttccacgcaacggttgttccacttcaacaacactgccactttggcgcaaagagggatcaagactaatttctttcatacttaaaaccggtgcacaaggaatatcaaactgagtcaaataggccaccgcttcatgtttatcaatagtgacagtgtatttttcgatttcagcaaaaatatcgaaaatatgtggctgtcgtgcatgggctgtactgtatgccggatcggtaatccattctggtttgccgatggctttacaggtgttttcccagttttgctcctgaatagtgaaataaatataggcgttaggatcggtttcccagcctttacatttcaggatccagccaggctgaccgccaccacctgcattaccaccgcggggaactgcatcaccaaatgtaccattcggatactgcgggtattcttccagatgacccaatttatcgagacgctgctggtcacgtaatttcacgcggcaaaggttcaatacggcatcctgcatactcatggtgactcgttgcccacgccccgttttttcgcgatgcagcaaagcagcaagtaaaccgatcagcaaatgcattccggtgttgctgtcacccaacgctgcagcgcttaccagcggcggaccatcccaaaaacccgtagtggatgccgcgccacccgctgcctgagcaacgttttcataggcttttacattcacataagggctacactcatcaaaccctttgatgctaccaaaaatcagacgtggattgatttcttgaatatgctcccaggtgaagcccatgtgatcaatggcccctggatgaaagttctcgactaagatatcagcttcgcggatcagcttttccattacctctttgccttccgctgttttggtatttaactcaatagaacgtttgttactgttaagcatggtgaagtaaagcgcatcgatatcaggaatatctcgcagctggtgacgcgttacgtcaccaacgccgggacgttcaattttaataacgtcagcgccaaaccaggccagcatttgagtacaagatgggccagattgcacaccggtgaaatcgagaactttaattccttgaagtggagtactcatagcaatacctattagttaattaaatatgtgttaatttagcgtttatttaaggcgtaatatcttctataaataacccgcaaaatatcgtcgtagctgcactcgatatttttaaaatcctgtatcaagtgctgaaaatcatttcatcgccacttccaattcctttctgcatggtaagtagtgaggacgaaaagaagaatatgataaatattgattcgtggtaatcagagagagtcgcgacatttgtgatgttattcttacaactgtaagaagcgccggtgatttacaagcaagggtatgattacgctttttaaagcgtaccataaaacataacataataaatgatttgtgatgacacgggattattgcggtttactttgaggaatataaaatgcgagtttatagcaccgcgagcgccaaataattttatgaccacaacctgtcgtattgtggtcataaaaaattgtcggctggagggagttaaatcctttacctcaatatactgcctgtcagcattagttcacaaacagtgcttcgctatcgacgatgattccatcttccgcacctttaagcgccaggtttgcctcgtagtattgctttttatcaagcagtttctgcgcatcagcaagtgcattacgagtctgtttaagtggcatcagatattggttttccattacgccaacaccggccaggcgaagctcttccattgcgccctttttatcccctttcgccattttttcattggcaatttttatcgcggcttctttttcgggagttgctacataactctcagaaattccgacagatgcattaatgacaatatattggtcatcattgagattggtctttttacctggcttagcgaactttgcccattcggtactgtcatcactcagcaaagcggaagcttcattggtcagttcttttgccttttctggatcgccatgaaacagagccaggcgcgctacctgcacgtcacgcatcgcatataaaccttgttcagagatacgctctgctgccgctgccgttttctgggtttgctgaacttgctgagtttgctgttgtgccgctaccggagcattatcagcagcccatacagtactagatgccagaattgctgtgaccatcgtggccataattaaacgtttcatacttacctcattctttaacagttttagaaaacgccgccatcatattgggtgagcatgaaatgagaaatcagagagcaacggtcattttgaaagggttatcttacagttgtagttattatcgcaagaagtattttagtcttacaattgtaggaatatgcttcctgtcgcagagaactattcttatataccacaaagagatgtcatttattatatcgatgtaaatactgattaattaaatgtaaatacagccataacatcgtaggttctcagtgaaccattttcaggataactttctatgaaagtaaacttaatacttttcagcttatttttattggtctctattatggcatgcaatgtttttgcattttccattagcggtggtggaagtgagaggagctataaagagactgaaaaaacaagtgcgatgacgaccacacactctacaaaacttcagccaagtcaggcgattttgtttaagatgagagaagatgcgccaccattaaacctcacagaagaaatgccgcccccttttccgacaaaggcgaattatcttattcatcctgtgcgataacgtctttcacatggcaggtgaacaatcatgtctgatgctgatgtgaacacctgcccaaatgagccatcctgacccattaccgcctgccataccccaccataaagcgaatcatcaagccacaagccggggcaagaaacataaatatccccgtcactagttcattaccgccagttaaccacatggtgaagtaataaatgagtgcagcgaggatcaccatgccgaagaaagaagagaccgcgcttaccacgttcagtacctgaccgatgtagccgcttacgcagacaatacacagggcgagaaacatccataaattaatcatagctcaacctcctgccgcgctaaaaaacctgtaacttcagtcactttaatagtaagacaatccttaacctctggcaatttttgctaagcatcaatgaaaacagcatgttaaatgcaagactgttgtgtacggaaaaatatttactttgcacgattaataatcagtagctgaaagcagtcagcgagtgataaagtacagataccgcattcatgctcctcgtggttatgtcctgactagtctttacactctttacaggaaccattgtcgtacatgatggcccaaccaattgagtgtaccgctgtcgacatggaatcttctgcgatacaacaattcgtatctacagaaggtaactatgtttccacaatgcaaattttcccgcgagtttctacatcctcgctactggctcacatggtttgggcttggtgtactctggctttgggtacagcttccttatcctgttctctgctttctcggcacgcgtattggcgcaatggcgcgaccattcctgaaacgtcgtgaatctatcgcccgtaaaaacctggaactttgtttcccgcagcattctgcggaagaacgcgagaagatgattgccgaaaactttcgtagtctcggcatggcgctggtagaaaccggcatggcatggttctggcccgacagtcgcgtacgtaaatggtttgatgttgaagggttggataaccttaaacgcgcacaaatgcaaaatcgcggcgtaatggttgtcggcgtccattttatgagcctggaactgggcggccgcgtgatgggactgtgccaaccaatgatggctacctatcgtccacataataatcagctgatggaatgggtgcagacccgtgggcgcatgcgctctaacaaagcgatgatcggcagaaataatctgcgcggcattgtcggtgcactgaagaaaggtgaagcggtatggtttgctcccgatcaggattatggtcgtaaaggcagctccttcgcgccgttctttgcggtggaaaatgtcgccacaaccaatggcacctatgttctctcccgtctctctggcgcagccatgttgaccgtaacgatggtaagaaaagcggattacagcggatatcgtttgttcatcaccccagagatggaaggctacccgacagatgaaaatcaagccgctgcctatatgaacaagattatcgagaaagagatcatgcgcgcaccggagcagtacctctggatccaccgtcgctttaaaacgcgcccggtgggagaaagcagcttgtacatttaacaaactgctcttactctttccctcctcaaatcggccataataacctcatggtttttatggcttttttcttaaggttttttccttcgctgaatatctaattattaccgtcagaaattaaactgtcgccgatatgagacacttgtaagttactaaaagtaaataagaaaatgcctcttgtctcgtttcagttttaggcgtacattagcgccgtctcgagcagtttagctcagaattctggggtgatgcccacggtaaaatacagggcttttaaggtcgctttgcccggtgtcaactcactgtatcaggtgtaatgaagtcattcaggcgtaacagtaattacgcggagagatgtaaagtgaaatatttctttatgggcatttcttttatggtcatcgtttgggccggtacttttgccctgatgatctaaaagcaaactgtgcaatgaaaaacaggagccatcaggctcctgtttgcatttctgacgacggtgtttattccgcgttttcgtgaatatgtttgctgctggcgggtagtaaaccgtcggcacggaacatcgctttaatccctctgatggcctgacgaatacggtcgcggttttcaatcagtgcaaagcgaacatgcgtatcaccatagtcgccaaagccaatccccgggctgacacaaaccttcgcttcgttaaggagcttcttggcaaattccaggcttcccatggccgcatatggttccgggattttcgcccagacatacatgctagccttcggcatttcaaccatccagcccgcttcatgcagccctttaaccaatacatcacggcggcgtttgtactgttcggcaatgtcgcgcacgcactgttgatcgccctccagcgccgcaatcgccgccacctgcaacggcgtaaaggtgccgtaatcgtgatagcttttaatacgagccagggcgctgaccagcgttttgttgccaaccataaagccgatacgccagcccgccatgttgtagcttttgctcagcgtaaagaactcgactgccacatcgcgtgcacccggtacctgcataatactcggcgctttccagccatcgtagacgatatcggcataggccaggtcatggaccaccagcacatcgtagcgtttcgccagcgccactactttttcgaagaactccagttccacgcattgcgcggttgggttactcgggaagccgaggatcatcatcttcggtttcggataactttcacgaatggctcgctccagttcgttgaagaaatcgacaccttccaccagcggcacactgcgtacctgcgccccggcaatcaccgcgccataaatatggatcgggtaacttggattcggcaccagcaccgtgtcaccatgatccagcgtcgccagcatcagatgcgccaggccctctttgctaccaatagtgacgatggcttcactttccgggtcgatttcaacgtcgtagcgatcctgataccagcgggaaatggcgcgacgtaaccgcggaatgccgcgactagtggagtaaccatgcgtgtccgggcgctgggccacagtacataatttttcgacgatatgcggcggagtcgcaccgtccgggttacccatgctgaaatcgataatatcttcgccgcgccgacgcgcagccattttcagttcagcggtgatgttaaaaacgtagggcgggagacgatcaatgcgcgtaaagcgacgttcagggcgagtgtcagccataatttcctcagattaacgttagcgcccggaccgtccgagcgacgctgccacgatggtggctgttttgaaaatagcctgattaatttctgtctgtccagtgttttagaacattttattaatgacgttaaatgaggaactctgctttaaaaacaggaaatttatctgcgctaacaagaaaattaccactcattctattaacataataatttcaataaatttactaaccagaagtgcattatcaagagatgcattgctaatacaccatttatctatcaatccccttttaaaattgtggtttttcctcaaaaacggcctgctggtcatcagccttcaggttacctatcatagaggtttaatccttattcagagtcacccgtgcacgaaatattcaacatgctgctggcggtcttcgatcgggcagcgttaatgcttatctgcctgttctttctcatccgtatccgcctgtttcgcgaactgttgcacaagagcgcgcactccccaaaagaattgctcgccgttaccgccattttcagcctgttcgccctgttcagcacctggtccggcgttcccgtagaaggcagcctggtgaacgtacgtattatcgcggtgatgtccggcgggattctgtttggcccgtgggtaggcatcattaccggcgtgattgcgggtattcaccggtatttaattgatatcggcggcgtgacggcgatcccctgctttatcaccagcattctggcgggttgtataagcggctggatcaacctgaaaatccccaaagcacagcgctggcgcgtcggtattctcggcggcatgttgtgtgagacgttgaccatgattctggtaattgtctgggcaccaactaccgcgttggggatcgatatcgtctctaaaatcggcattccaatgatcctcggtagcgtctgtatcggctttattgtgcttctggtgcaaagcgttgagggcgaaaaagaggccagcgccgcgcggcaggccaagctggcgctggatatcgccaacaaaacgctaccgctgtttcgccatgtcaatagcgagagtttacgcaaggtctgcgaaattatccgcgatgacattcacgccgatgcggtggcgattactaataccgatcatgtgctggcctatgttggcgtgggtgaacataactatcagaatggcgatgacttcattagcccgactacccgtcaggcgatgaattacggaaaaatcatcattaaaaacaatgatgaagcccaccgcacaccagagattcattccatgctggtgatcccattgtgggagaaaggggtcgtgaccggaacgctgaaaatttactactgccacgcgcatcagatcaccagcagtttacaggaaatggcggtcggtctgagccaaatcatctccacgcaactggaggttagtcgcgccgagcagctacgtgaaatggcaaataaggcagagcttcgcgccctgcaaagcaaaattaatccccattttctgtttaacgctctgaacgctattagtagcagtatccgtctgaatccggataccgctcgccagttgatctttaatctgagccgttatctgcgctataacattgaattaaaagacgatgagcaaatcgatatcaaaaaagagctgtatcaaattaaagactatattgccattgagcaggcccgctttggtgacaagctgacggttatctatgatattgatgaagaggtgaattgctgcattcccagcctgctgatccagccgttggtggagaacgccattgtccacggtattcagccttgcaaaggtaaaggcgttgtcaccatcagcgttgcagagtgcggaaatcgggtacgcattgcggtgcgagataccgggcacggcatcgatccaaaggtgattgagcgggtcgaagcgaatgaaatgccgggcaataaaattggcctgctgaatgtccatcatcgcgtgaagttattgtatggcgaggggctgcatatccgccgcctggagccggggacggaaattgcgttttacattcctaaccaacgcaccccagtcgccagtcaggctacgttattgctttgagccggagtgatattgtgaaagtcatcattgttgaagacgaattcctggcacaacaggaactgagctggctaattaaagagcacagccagatggagattgtcggcacctttgacgacggtctggacgtgttgaagtttttgcagcataaccgcgtcgacgccatttttctggatatcaatattccgagcctggatggcgtgttgctggcgcaaaacatcagccagttcgcccataaaccgtttattgtgttcatcaccgcgtggaaagaacatgcggtagaagcgtttgaactggaggcgtttgactacattctcaaaccgtatcaggagagtcgtattaccgggatgctgcaaaaactggaagcggcctggcaacaacagcagaccagcagtacgcctgccgcgacggtaacgcgtgagaatgacaccattaatctggtgaaagatgagcgaataatcgtcacgccaattaacgatatctattacgccgaagcgcacgagaaaatgacctttgtctatacgcggcgtgaatcctacgtaatgccgatgaacattaccgaattttgcagcaaactgccgccgagccattttttccgctgccatcgcagtttttgtgtcaatctgaacaaaatacgcgaaatcgaaccgtggtttaataacacctacattctgcgactgaaagatctggattttgaagtgccggtcagccgcagcaaagtgaaagaatttcgccagttaatgcatctttaatcgggaactttcatgaaagcaccaggcttgcccgccgatcaacaatttttcgccgatctgttcagcggcctggtgcttaacccgcaactactggggcgcgtctggtttgccagccagcctgccagcttgccggtgggcagtttatgtattgattttccccgtctggatatcgtgctgcgcggcgaatacggcaatctgctggaagcaaagcagcaacgtttggtggaaggagaaatgctgtttattccggcgcgcgcggctaatttaccggtcaacaacaaaccggtgatgctgttaagcctggtgttcgctccgacctggcttgggttaagcttttacgatagccgcaccacgagcttgttgcatcctgctcgccagatccagcttcccagcctgcaacgcggtgaaggtgaagcgatgcttaccgccctcacccatcttagccgtagcccgctggagcaaaatatcattcagccgctggtgttaagtttgctgcatctttgccgtagcgtggtgaatatgccgccgggcaatagccagccgcgcggcgattttctctatcacagcatttgtaactgggttcaggataattatgcccagccgctcacccgcgagagcgtggcgcagttttttaatatcacgcccaatcatctgagtaaactgtttgctcagcatggaacgatgcgttttatcgagtatgtgcgttgggtgcgaatggcgaaggcgaggatgattttgcagaaatatcatctgagtattcatgaagtggcacagcgttgcggttttccggatagcgactatttttgtcgcgttttccggcgtcagtttggtctgacgccgggagagtacagcgcccgttttcagggctaacgtcagaaggttaattctgtttccagcagcgtcaggatactttgtgcatcttgcgcggcaaacaagctctggcggaagtttttattcaccagtttacgcgccagctggctgaagactttcacatgattcatcccttcgttagcacccagcgtcagcatgatcaccagttcgacttcgcccatttcactctgccagccaatcggtttcgccagccgggcaatgctgatactggaatgacggatccactgagatttggtgtgcgggatcgctacgccaaaaccaacgccggtggtaacaatctcttcccgctgccagacatcttcttccagctcaaacggatgttcagtgcgcccgttaacgccgaggttgccgcacaggaactggatcgcctgctctttattgctaaaatcctgatcaacaaagatattctccagcgccagcagtgggcgaacgtcttcttccggcgtaaaggcggtgagtaacgcttcaatttcctgcgcactgcggcattcacatgcctgacgcgccagttcccgacacgcctcgctatccagttgacgaagctggcttttcaccgccggaatacgcgggctactcatactcagctcatccaggcccagcccaagcagtagcggcagataacggctttcaccgcccagttcaccgcaaatgcctacccatttgccccgctgatgcgcagtggtaactatttgctgcaacatgcgcaggaagcttggcgtaatcgggttatatagcgggcttacgcgcgggttattacgatcgaccgcatacagatactgggtcatatcgttggagccgatactgaagaaatcgacctcatcgcagaagtggtcgatgatgtagcacacgctcggaacttccaccatgatcccaagcgtaatcgtctctgcatgacgcaggccatcgcgcttaagctcaacgatcgctttttggatctcgcctttcacccataagatctgatcgaggctgtgaaccatcgggatcatcaactgggcgttgccgaaactggcggcgcgcaaaatggcccgcagttgagtgcggaacaggccagcaaattccgggtaaatacgtaccgcgcgatagccgaggaacgggttctcttcctggggaatattcagataaggaatgcttttatcgccgccgatgtccatcgtgcggaagataatcggcttgtcgcccgccgccagtagcacctgctggtaggcttcaaattgctcctgctcgtccggcgcgctgtcgcgatccatatagagcatttcggtacggaacagcccgacaccttccgcgccgttggcaaacgcgcctggcgcttccagagcggtgccgatattcgccgcaatatcaatacgcttgttatcacgggaataggccagctgcgcggcagcctgcgcctgttgtttttggcgtttatccgccagcgtctgcgcgacctgataataaccgctcaccgcgtcattcgggttaatcgccagcacgccgcactgggcgtcaagcactgcaggttgcccggcataacgggcaatcgcatccagcggcaagccactcagtaccgggatcgcgctggcacgggccagaatcagtgtatggctggtgcgcccggttttctccagaatcatgcccgcaagatttttcaaatcaaggctcaaaaactggcttggggttaaatcttcagccaccagaatggtcggtttttcaagcaccagcttgttgcgcggcttcagttccggccaggtgatatgcagcaactgttcgctgatatcgcgaatgtcgctaacacgttcgcgcagataatcgctggcagaggcagaaagtttggcgcaaacctgctccatattgctgatgatcgccgcccccagcccctgatgctgttctgtcatcaggcgacggatattgcctgcaaattcatcatcctgaatcaggctcaaatgggcgctgaggatagttttgctttcgccgtcacgctcacgcaattgctggttcagttgctcggcaagcgttgccaggctgtgctccagccgggtggaatcttgcgcactggcggggattgcccgataactgtcgaggctgtcgctttgtaacagggtcagcgtacccacgccgacgccgcttgccagcacattgccgtacagtaaatccgggttaaggcggcttaaactacgcggcagcggatgcgccgtcagttctgcctgcgtaggctgaacgctgtcgctgtcgataaagcgcacctggatgtactcttccagcacgcgccgcgcctgctcttcatcgctgccgctaatgttcaggctgcaactgtcattaaatagggtgccggtgccaatcagcgccaggctgcttttcgcatctgcctttgcgttctggcgatggttaataaaagtgatttcgctttgccactggctgcactgttctttaagttcccacgccggacgagcatgtagaccgttaggcaaaggacagagaaattgaatcgttaacataaccgctccgggttaatcaggagatcatctgaaatccgtcagttgaacaaccgtctcacgcgtaagacgttgaataagggcagataaaagttgctgcatctgcaaaatgtcgcggcaatcggcaatgcttgcggcgcaatgtccatggcgggttgctggccccatcaccactgtgggcacgccggtgccggttaagtgcaccgccccgccgtccgtgccgccgttgctgaacatatctgcctgcaacggcacgccaatttctgccgccacggtttcgacccaggcggtaagttttggcggcgcaatcaggctcttgtcgcttaacaccagcatcggcccgttaccaatctggcgatggttagccgcgccataatcaaagtttttcgcccagcaggcggtatcaagcacaatggcgacgtccgggctcaccgcgcgggtggcagtttgcccgccgcgtaatcccacctcttcgctggaacttgccaccagccacacttccgcaggtagttcggcgtcgtgcagttcgcgcagtaacgtcaccagcagatagcaaccgaggcggtcatcaaaggctttccccatcactcgctggtgagggagaacctgaaaagtggtatcaaacgtgacgcgatcgccgggacgaattcccgcctgcatcacttcgtcataggagcgcgcaccaatgtccacgcgcatggcgctgacgtcattcccctgccggtcgccgtcaagcaggcctggaattttgcactcttcacgggtggtgatgcgcaccggctgcagctggcgggcagccatgcgtacgttgccaaccggcagcacatcaatcgccccttcgcgggagatgctgcgcaccataaatcccacttcgtccatatgcgcacagatcatcaccttcggacctgtgctttcattcaggcggatcagcacgcttcccagaccatcaaatcgcacttctttttgcaggcgatccgcttcttccagcaggatctgccgcacttcctgttcgctggaggcgatcgcatctgcctcgctcaacgcttttaataggcttaaatccattatgcctctcccgtgagcaacactgttttcggcatggcgtagagcacttctgcgccttgcggggtaaccagcacaacatcttcgatgcgcacgcccccttgccctggcaaataaatccccggctccacggtcagtaacatgcctggctgtagcgtcgtggtgtcccgcggactaaaacgcggatcttcatgaacttcaatgccgatagcgtgaccggtgttatgaccgaaatagtcgccataacctgcttctgtaatgacccggcgcgcggcatcgtcaacctgctggcagcgcacgccggggcgaatcgcggagattgctgcgagctgtgcctgcaggacaatttgatagacgttaaacagcaggtgagattcggcgctcaccccttcgccattcaccagcaaggtgcgcgtcatatcagagcagtagccctgatacagcgcaccgaaatcgagagtgacaaactcgcccgctgcaacaatcttgtcgctggctttgccgtgcggcagcgccccacgccagccactggcgacaatggtgtcaaaagaggctttttctgcgccctgctggcgcataaaccactccagttcagcggctatctcgcgctcgctcatccccgcctgaataaagcggcgaatatgctctgcaccgcgatcagcaatcccacaggcgaggcggattttctccacctcctctggcgttttgatttgccgcagcacatccggcgtggcgctaaccagtttcgcattgagttcagactgccagcggtgcgcggtttcccaactcacctgctggccctcaaaaccgagcgtttgcaactgttcatcggcaatgatttgattgacgatagtggtaagcgtgttcgtcgcgtcaagcaaatgcagctggtagccttgcgcacgggcttccacctcaacgtaatagcggctatccaccagaatgtgcgcactttcacggctaatcaccacataaccacttccggtggagatccccagatgcggctgtttgttctgccgactggagagaagcactgcatccagttgttgcgccttaagccagtcgcgcaggctagcgagtaatgtcatctggattttccttcttacaggctatcgattaacaatttgcctttacggaacatcatcagacgcaggaacaccaccatcagcgcagttatgactgcccccagcgcgatccccgccatatagacgcccaggttagtgaccagcggccatgcccagatagcggactccgggaaccattgcactgcgcccagccagacagcggcggtactgccgacaatagcgccgaccatatagctcggaatggcggtgatagggctttccagcgcaaacggaatcgcaccctcactgatccccataaacgccaggaacatggcggtcttaccctgcggataaagttgagcgttgaacaggcgtttgccggttaaacgacggtcgataatggtcgccagccccagaccaatcggcggaataacgatagcgatagaacgagcggtgaccggtaatacgtggtcagtggtaaagctgaaggcaacaaaacctgcggctttgttgatcgggccaccaaggtcgattgctgtcgccgcggcgatccccattgcgtacatcagcgcgcccttctcacctgcggcagtcagcacagtacggataccgccgttgatccagccaccaaagggggtgatgacgtagtacatcgccagcatgacaaaaatggcggaaagaatcgggagcaaaaatgtggttttgaacgctaacaggaaatccggtaactggattttctggttcatccacttcacaaggtaaccggcaacgatagaaataatcagcgcaccaatgaaggtggacggcaccgggctagaggtcgcccattgcatagtgctgggatcgaagttcagcagttgcgtcggctgggtagacatcaacccgccgataaaaccagccgggaacgccagtttgccaccgatagagttcgccacaaaagcagcaaacatcggaatggcaaaaccaaacaacacgccgccgaaggactggctcagccaggcaaatttaagtaaggagaggtcgaaaccggagaatttcccgctattaagagcatccatgatgccgatctcagcaggaattttaagccagctataagcaatcagctggctgaaagcgaggatcacaccgcccataattaaggtcggcaccatgcgactaatcccactcatcacatgctgcgggagttcaccccagaagctggttttagaggcctgcggattcttaactgccgctgccgcaccggatgcgccaggcacaacggttgcactgcgttttttaatggccataacaattatccctgtcgaatattactgttgttcagaggcaatcatctcttcgatttctttgatgatgcccgcagcgtttttaattgcgtcctgcaaagtgatttcataaacgtcgcgactttcgaaacgttcgttatcttccggggtaactgccacggagtggatgatgatggtcgcttcggcgatatcctgcgccgtcaggcgattctggataccgtccgcgccctgggtttcaattttcacttcataaccggcttctaccgccgcttcttccagcgcctgagcggccataaaggtgtgagccaggcccatcgggcaggcacataaggcaatcagtttcttactcatcgttaattcctcgttcagtgatagttgacgagtgaaattatgaacgtgcaaaacaaatcgccgttaccagacaaataatgcatttactggagaattaatcccgctgtacggaagtgtgacgcaggtcgaccttgtgaggggacacaaagaaaaattgaataaactgtatgatttaaaagattatcgggagagttacctcccgatataaaaggaaggatttacagaatgtgacctaaggtctggcgtaaatgtgcaccggaaccgagaaggcccggattgtcatggacgatgagatacaccggaatatcatggacatattctttaaagcgccctttatcttcaaatgcggcacggaaaccggaggctttgaagaactcaaggaagcgcggcacgataccgcccgcaataaacacgccgccaaatgtcccgagattgagcgccagattgccgccaaaacggcccataatgacgcaaaacaggctcaatgcgcggcggcaatcggtgcagctgtcagccagcgcgcgttcggtaatatcttttggcttgagattttctggcaggcggttgtcagctttcacaattgcgcgatacaaattcaccagcccagggccagaaagcacgcgctccgcgctaacatgaccaatttccgcacgcaatatttcgaggataatggcctcttcttcactattcggcgcaaaatcaacgtgaccgccttcgcctggcaagcttacccaacgcttatcgacatggaccagatgcgcaaccccaagccccgttccggcaccgtaaaccgcaataggcttaccttcgaccggttctgcgccaccaaactgaatcagatgctcttttttcagcatcgggatcgccatgcttacagcggtaaaatcgttaataatttccagatggctaaaaccgagattctttttcatttcggcaatactgaacgcccaggtatggttggtcatcgccacccagtcaccggtaattgggcaagcgatggcaatacagccgtctttcacctcgaccttatgttcttcaagataaacgcgaatgaccgcttcgaggctggggtaatcaagcccactataggtcttagcctggctgatttcaccactggcaatatcacacagagcaagacgtgcgttggtgccgcccacatcaccgactaatgcatactttgtcattcttcaactgctccgctaaagtcaaaataattctttctcacactgtaaatacctgggggcataacaacaacgccggaaaggcaggctccctgtaaatatcgatctgggtcacacaattactttatcgtttcagcaccaattgcagcgatgcctttttgcaagctgggcaaactaagtatctgaccccgcataaggaatagaacacaggcggcactaacccggacgtagactgtattacaaaagcggcaaaaagcagagacaaaaaacccccgctttgcagcgagggttggaaatttggtggagctaagcgggatcgaaccgctgacctcttgcatgccatgcaagcgctctcccagctgagctatagccccacgatgcgtttacgtaccaagtttgctgggtgcaaaatttggtggagctaagcgggatcgaaccgctgacctcttgcatgccatgcaagcgctctcccagctgagctatagccccgtcacgtaaagcttgtcgagttgacgggcggcatcatatgaattccgcccgaatgtgtcaacggcaaattgcaacgtgtagtttcaatcgctgaaaaatcaggcaaatgaacaattttggaaaaccgctcgcattcagtagttattcatgtcacggtttcctgtaaagtggtgttataaaatgaactactaatagacccacatacattcagggaattgttatgttcaaggagaggatgacaccagatgaacttgccagactgaccggctatagccgccagaccattaataaatgggtacgcaaggaaggctggacaacgagtccaaaacctggcgtccagggtggcaaagcccgactggttcacgtcaatgaacaggttcgtgaatatattcgcaatgctgaacgtccagaaggtcagggagaagcgcctgccctttctggtgatgcgccgcttgaagtattgctggtgacactggcgaaagagatgacgccagttgaacaaaaacagtttacatccttgcttctgcgggaagggattatcggattgttacaacgcttagggattcgcgatagcaaataatatgaaaagattacgcaataaaatgaccaccgaagaactggctgaatgcctcggtgtggctaaacaaactgttaaccgttggatcagagaaaaaggctggaaaacggaaaaatttcccggcgtgaaaggcggtcgtgccagacttattctggtcgatacgcaagtttgcgagtttattcagaacacgccagccttccataacacaccaatgttgatggaagctgaagagagaattgctgaatacgctcctggagcacgcgccccggcgtatcgacaaatcatcaacgcgatagataatatgacagacattgagcaggaaaaagtcgcgcaatttttgagtcgtgaaggaattcgcaatttcctcgcccgtctcgatattgacgaaagtgcataaataaaaaacggcaggatattatctcctgccgtttatctttttacacgctaattactgctgattttcgcgttcagcaataaaatccagcgctttgttgatacgctcgatactgcgggtcttaccaattgcgtgaacggtaacatccagtgctggagactgccccgcaccggttacggcgacacgcagcggcataccaactttacccatacccacttccagctcatccgccgtcgcctgaatagcgtgatgaacgttttcagcggtccagtcagtaatcgcggccagtttgtcacgaaccacttccagcggctgacgcgctaccggacgcagatgttttttcgcggcgtcggcatcgaactcagcaaaatcttcgtagaaataacggcagctctgtgccatctctttcagcgtcttgcagcgttcgcccagcagtttcaccagatcagccagctgcgggccgttacgggtatcgatattttcctgctcaatgtgccactgtaagtgagtagcaacatactccggcggcagcgcgttaatgtagtgatggttcagccacagcagcttgtcggtgttgaacgcactggcagatttgctgacggcattcaaagtgaagtatttgatcatctcttcacgagtgaagatttcctgatcgccgtgggaccagcccagacgcaccagatagttcagcagtgcttctggcaaataaccgtcatcacgatactgcattacgctgactgccccgtgacgtttggacagttttttaccgtcatcgccattgatcatagaaacgtgcgcgtaaaccggcaccggcgctttcagggccttaagaatgttgatctggcgtggcgtgttgttgatatggtcttcgccacggataacgtgggtgatttccatatcccagtcatcgacaaccacacagaagttataggttggggaaccatcggtacggcggataataagatcgtccagttcctggttgctgaactcgatcggaccacggatctgatcgtcaaaaacaacagaaccttcctgcgggttagcaaaacgtacaacacacggttcatcatcagcatgatgctcatggctgtggcggcagcgaccgtcataacgcggcttctcacctttcgccatttgctcttcgcgcagcgcttccaggcgctctttagagcaatagcatttataagcagtgccctcttccagcatctgatcgatcaccgcgttgtagcgatcaaaacgtttggtctggtagtacggaccttcatcccactccaggctcagccagttcatgccatccataatggcttcgatagcttccggcgtggaacgctcaagatcggtgtcttcaatacgcagcacgaactcaccgccgtggttacgtgcaaaaagccaggagtaaagagcagtacgcgcgccgccaacgtgcagatagcctgttgggcttggcgcgaagcgagttttgattttcatgaaatggccttacgtttagaaagatgccgacaaccggcaaatcctggaaaaattaagtgggcgatattctatcactcccgcctgattcctcaatgtagttcgggtttctaccttacgcattattgttttcgttgacaaattgcgcaacacggtctgttttgcgatcatcttgcttaaatttacgacgaacgaacaatttctttagaaaatgcgttgactcattttgaactctccctataatgcgactccacacagcgggggtgattagctcagctgggagagcacctcccttacaaggagggggtcggcggttcgatcccgtcatcacccaccaactactttatgtagtctccgccgtgtagcaagaaattgagaagtgggtgattagctcagctgggagagcacctcccttacaaggagggggtcggcggttcgatcccgtcatcacccaccactttctcgccagctaaatttcttgtaaaaatgtgaagtaccgaagtgggtgattagctcagctgggagagcacctcccttacaaggagggggtcggcggttcgatcccgtcatcacccaccacttcgggtcgttagctcagttggtagagcagttgacttttaatcaattggtcgcaggttcgaatcctgcacgacccaccaatgtaaaaaagcgccctaaaggcgcttttttactatctgcgatactcaaagattcgaacctgcagcaggtttgagttgagcgcagcgaaacaacggagccgctcgtgctggcgacggcccgaagggcgagcgaagcgagtcatcctgcacgacccaccaatgtaaaaaagcgccctaaaggcgcttttttgctatctgcgatttgcgaaattgcctgatgcgcttcacttagcagactactatttccggcaattcctgtctcctcacttactgtgtcaatgcagccaacagcttaaccatcgcgggcgtcacctgctgtgtttcataaacaatatataaatctgcagggatgcgctgtttgagcggacggaaaatgacacctggccagttcatttgtgcgtagctgtccgctatcaatgtgataccaatgcccatactgaccatagcgagtaccgtttgcggttcattaacttcgcgaataacaaccggactaaatcccacctgctggcaaactcgctgcaaaaaatcccagtcagtgtaaacgggcggcattgtaacaaaatactcgtcacgtagcgcttccagcgggacggtggaaaaactactgagatgatgctcttcaggcatcgccaccagaaacgcgctttcatgcaaccgtaagctggtaaaaccagtcggtggttctgtcgccattcgccagatcccggcatcaagttcgcggcgttccagcaaggccatttgcatcgcgggcatcttttcgcgaaaaagaacgtcaacgttaggattttccctgaggaatcgccgcataaccgggcgcatccgtccccacattgccgttcccactacgccgagttcaatccgccctgcttctccccgacctatttgttcaatccgagccaatacattattagcattcaccagcaatcgacggctttcttccatcaagattttgcccgcgtgtgtcagtacgacgctgcggctatggcgaataaaaagctgcgtgccgagttgattttccagctctttaatatgaatgctgagcggaggctgagacatatttaaacgcgctgctgcgcggccaaaatgcaactcttccgctacggcaagaaaataacggagcaacttaagatctgttctgtatacgcgttccataattaagtgctccatataataaatacatcgtattaaattatcatggcataaagtatttcaccaccagatatccgacatacataaacacaatggataatatacccggtaatacatttggtacaggaataggcaagcgcacgattgtaaacaaagcaccaataccaaaaccaacgccggaagaaaataaaatatctttcactaattaacctttatcataaaagcagctctgaagagcagagccgcgaatccttttaatgagtcaccgctcgatgctttatcttttcagggtcatgattatatttaaacccaaagaaaaatatcactgcgagaaaaagagcatatcctgcaaacaccagccagatagtttgccagtcttttacgccatccacgctaaagtaatctactgccatgccactcagaatgctgccaacccatgcgccgacaccatttaccatggtcataaagagcccctgcgcgctggcacgaatgctggaatcaacttcctgttcgacaaatacgctaccagaaatattgaagaaatcgaatgcacagccataaacaatcatgctcagcagcagcaaaataaatccggttgtactcggatcgccataggcgaagaagccaaagcgcagcgtccaggccaccatactcatcagcatgacggttttaatgccaaatcgctttaaaaagaatgggatagtcagtataaagcccacttctgccatctgactaacactcagtaaaatggagggatatttcaccacaaaactgtcagcaaactccgggttacgggcgaaatcatgtaggaacggattaccaaaaacgttggtaatttgcagtaccgcacccagcatcatggcaaagaggaaaaagatggccatgcgtggatttttaaacagcacgaaggcatccagacccagcttgctggcaaggcttgtggtcgcttttttctccgcaaccggaatcttcggcaaagtcagcgcataagcgctcagcagcaaactcgcaccggacgcgatatacagctgcagactactcaattccagatgcagcaggcttactgcccacatcgcgacaatgaaccccaccgtaccaaaaacgcgaatgggcgggaaagcggtcaccgggtcaagccctgcctgggcaagacaggaataagagacgctgttgcttaacgcaatagtcggcataaacgccatcgcattgactaacatcacccaaaacatcatatccggatcagttacggatgccgcataaaaaagtacgcccgcacacaccaggtgacacagcatgtatgcacgttctgcgcgcagccatttgtctgcgatgatccccattataccaggcataataatcgcggcgatccctttggaactgtaaaccatgccaacattagcgccggtgaaatgaagagtattaatcatgtaagagccgagggtaaccagccagctcccccagataaaatattgcaaaaaggacattacctttaagcgcatcgcgatgctcataatcgtttccttgtcgcatcatttggcctcacccgcgaggccgtttcttattgtttttctcaggcaattttgcgcagaaagccacaaataaggttgatgaagttctgcttagagagctccgcagccgccagcgtttgcgcatgactcaatttcacatcgcttaaaccttccgccatattggtaatcgcagagaccgcaacgactttaaggtcgcaatggcgagcactaataacctcaggcaccacagacataccaacaacatccccaccaataatttgcatcatgcgaatttccgccgcagtctcgaaattcggccccggatagctgacgaacacgccctccgtcagagggaaaccctcctctttcgccactttttgtaacagtgcgcggtattccgcatcgtaggcatttgccagactgaagaagcgctctccaaaacgatcatcgttaagacccaccatcggcgtaccgggcatggtgttgatatgatctttcaatgcgaccaggctgcctgcccccacttccggacgcaggctgcctgccgcattggtgcagaacagtagctcgcagcccagcagcttaaaggtacgaattgcgtcagtcataatggtcattccacgaccttcgtagaaatgtccgcgacctttcatacataccaccggtacgccctggagatggcccagcactaactcccccgcatgaccatgtaccgtacttaccgggaagcccggcagcttttcgtaggaaattgcgacagcgttctcaatctgatcggccagcgcgccgagcccggaacctaaaataaaggccactcgtggcgtgaaatcaggtttataagtcttgataatatctatgcaaaacagcgggttatgagaaaattgaacctgagacatacatatcctttttctgtagggtggaatctaacgcctttttatagcgaggttgtcccggctcttaccaatacacttttctcacgcattcaatagcgattcgatatcgatggatttatatcttttttctattaatccacggtaaaaactgtattggcgatattaattcctttgcattaacaatatgtcgtttttagcaaaccactttattaagcaatctactaataacgatcggcatagggaattatgctatgaaaaaacatcttttaactctgacactttcctctatattagcgatacctgttgtatctcatgcagaatttaaaggcggttttgcagatatcggcgtgcattatctggactggaccagccggactaccgaaaaaagcagcaccaaaagtcacaaagatgattttggttatcttgaatttgaaggtggcgctaactttagttggggagaaatgtacgggttcttcgactgggaaaacttctataacggtcgccataataaaccaggtagcgagcagcgttatacctttaaaaataccaaccgtatttacctgggtgacaccggatttaatctctacttgcatgcgtatggcacctacggttctgcgaatcgcgtgaatttccacgacgatatgttcctgtacggtatcggctacaatttcaccggcagcggttggtggttcaaaccgttctttgctaagcgttatacagatcaaacctattacactggcgacaacggctatgtcgccggctgggttgcaggttacaactttatgctgggcagcgagaaattcactcttaccaactggaacgagtacgagtttgaccgtgacgctacctatgcagcgggtaatggcggtaaagaagggctgaatggcgcagttgcactgtggtggaatgcaacaagtcacattactacggggattcagtatcgatatgcggatgacaaactgggcgaagatttttaccaggatgcgataatctactccatcaaatttaacttctgattgattactgccggggctcccggcagtatgaattcactttatatctgatacaacggatccccttcccgcccagccattagcgcattgccctggtctcgtaccacgtcccataaagcttcagcggcggtggaaagactacggttcttcctgcgcaccagcatcaactggcgttcaacaaccggcgtaatgcgctttaccaccagtgggctaccttcaggcaatggtagcgccagtgcgggaagaatactgatgccgatgcctgcggctaccatcgggaacagcgtcgccggatgtccaatctcctgcacaatattcgcctgaataccattgcgcgccagcgctgcgtcaatcagcggtcggctgccactcgcgtaatcctgcaacaccaatttcgctccctgtaatgcctgccagggtacataatcttccacggccaaagcgctatcgcgatggcaaagcagaaagaaaggctcggaaagaatcgcttcacattgcagatcgcccactgggcctggatcgatgacgatgccaaaatcgacatctccctggcgaatactttccattacccactgctgcggacgatcgtgcaggacaaactgaatatctggatagcggcgatggctttcagcaatgcattgcggaataagatgcgcggaaatggtctggctggcagcgacccgaacttttccgctcagttgttgccccatacgcccggtatcgcgcaacgtgctgttcagttcatccagcagtcgctcaagacgcaaagccagctgctgccctgcatctgtaagcaccacttcacgcgtggttctgtccagcaggcgaacaccagtatgattttccagttccttcacactgtgactcactgcgctctggctcaggccgatacgctctcctgcacgactaaaacttttctcctgcgctactgtgacgaaaacctttaattgttttaaagaataattcatctgttttcttcatgaatggatgcaataaatcaattttatttctcaaactggaagaagcacaatagaaccatcgatcatctggagtctttatgaaactttttcgtatcctcgatcctttcaccttaaccctgatcacggtggtgttgctggcctctttctttccggccagaggcgatttcgtccccttctttgaaaatctgaccaccgcagctattgccctgctgttctttatgcacggcgcgaagttgagccgtgaggcgattattgctggcggtggtcactggcgactgcatttgtgggtaatgtgcagcaccttcgtgctgtttccgattctgggtgtactgtttgcctggtggaaaccggtaaatgtcgacccgatgctctactccggttttctctacttgtgcattctcccggctaccgtgcagtctgcaatcgccttcacgagtatggcgggcggtaacgtcgcggcagcggtttgttctgcgagcgcatccagcctgctggggattttccttagtccattgctggttggtctggtgatgaatgttcacggtgcagggggcagccttgagcaggtcggtaaaattatgctgcaactgctgctgccgtttgtgttggggcatctttcccggccgtggattggtgactgggtgagccgcaataaaaaatggattgcgaaaactgaccagacgtccattctgttggtggtttatacagcgttcagcgaagccgtcgttaatggtatctggcataaagttggctggggaagtttgctgtttatcgtggtggtcagctgcgttcttctggctatcgtgattgtagttaacgtctttatggcacgccgactgagcttcaataaggcagatgaaattactatcgtcttttgtggtagcaaaaagagtctggcaaatggcatcccgatggcaaacattctgttccccacaagcgtgatcggtatgatggtgctgcccctgatgattttccatcagatccaattgatggtctgtgcggtgctggcgcgtcgatacaaacgccagaccgaacagttacaggcgcagcaggaaagcagcgccgataaagcttaaagcggacgcttcaggggctggaccagttgcgtcagcccctcggttttaatcagcagcgtgatttgcattagctcaccgagcttccctgccgggaactcatctttgcgggcaaaccacagcagatactcctccggcaggtcgattaagcgacgccctttgtatttgccaaacggcattatcgtattggctatttcaatcagctgctctttttccatctcagctacccagcaaacgcagcatttccgcttcgtcgatgacttcaatgcccagttcctgcgccttcgccagtttagatcctgcagcttcacccgctatcaccagatcggttttcttgctcacgctgcccgcgactttcgcgcccagttcgaccagtcgagctttagcgtcatcacggctcatctggcttaagctgcccgtaagcaccacggttttaccagcaaacgggctgtcaatctcttccgcgttgataacgatcggcgcaggccagtgaacaccttccgccaacagctcgctgatgacattgcggttgctttcttcggcaaagaagttgtgaacgtgggatgcaacgacaatgccaacatcaggcaccttttgcagctcttcaatgctagcggcttccagcgcttccagcgtgccgaaatatgccgccagacctgctgcggtggcctcgccgacttcacggatgccaagtgcatagaggaagcgagcaaaggtggtttctttcgctttttccagcgcgttaaccacgttttgtgcgctttttggccccatacgctccagtccggtcagtttgcctgcggtgagtttgaacagatctgccggagtatggacatattctttttcaaccagctgatcgatgattttgtcgcccattccgtcaacatccatcgcacggcgggaaacaaagtgtttcaggctctctttacgctgcgcaccgcaaatcaggccaccggtacagcgggcaaccgcttcaccttccacacgctcaacgtcagaaccacataccggacaatgcgtcgggaatacaacctcacgggtatcttccgggcgttcagaaagcacgacgttaaccacctgcgggatcacgtcgccagcgcggcgaatcaccactttatcgccaatgcgtaaaccaagacgttcgatttcatccgcattgtgtaaggttgcgttactcaccagcacgcctgcaacatggacaggttccagacgcgcaacaggcgtaatcgcgccagtacgcccaacctgaaactcgacgtcacgcacaaaggtcatctgctcctgcgccgggaatttaaacgctaccgcccagcgcggggcacgcgcgacaaagccaagctgctcctgctgtgccagactgttgaccttaatcaccacgccgtcgatatcaaagcccagcgtcgggcggtcttcttccactttgtgatagaacgccagcacttcttccgcgctttcacaaagcgttacccgatcgctgaccggcaacccccactttttaaattgcagtaaacggccaagatgagtatccggcagctcgccaccttccagaacaccaacgccatagcagaaaaaagtgagcggtcgcttcgctgtaatacgcggatcaagctgacgcagactaccagctgccgcattacgtgggttagcaaacactttcccgcccgtgcgtcgcgcatcttcgttaatcttttcgaaccccgcctgcggcaggaacacttcaccacgcacttccagacgcgccgggatattctctccgtgcagcttcagcggaatggcgcgaatagtacgcacattagacgtgatatcttccccggtggtgccatcgccacgggtcgcggcactgactaaaacgccattttcatacagaatactgacggcaagaccatccagcttcagctcacagcaccaggtgactttctcgttgtttttcagacggtcctgcacacgtttgttgaaagcaagaaagctttcttcatcaaaaacgttatccagactcagcattggtacttcatggcgtatctggctgaaagccgccagcggcgcagcgcctacacgttgagtagggctatcaggcgtaatcagttctggatgtttggtttccagctcgcgcagttcgcgcatcagcctgtcgtattcagcgtcgggaatttccggcgcatccatcacatgataaagatattcatgatggcgaagcgtcgttcgcagttctgtcagttgttgttcgatactttccatatcgcaccatcaatgctaaaaacccccgacaagcgggggttcgaagaggagttaatttgccttaagtgtatcaggcgttggcgtctttgacttcgcggatgatgtcctggtactcgcgcaatttctgcggagtcatcatacggcgctgatcgtcaagcacgacaccgcccacttcatcggcaatatgctgcgcagattgcagcatcagcttgaagttctgcagctcgtcaccgtaagacggtacctgcataaagatagtgacacccggagtagtgaaatccttcatttcaggatcaaaggttcccggtttcaccatattcgccaggctgaataacgccgggccgctgccatccgggctaagatgacgatggtaaatattcatatcgccaaaaatgaagcccgcttgttgaatgctgttaagaagcagttcaccgtttagctcgctaccgtgatgcgccgcgacgttcatgataatcaccgcttctttgcgcttcggtttatccataactggagcaggttccgctacaggctcaggctgtggtgccgctacgggttctgcaggctggaaagcctgttgtgccggttgcggtgcactatgcacaggctgcggcgctggcgcgacctgtgggctaactggctgctgcaacggctgttcaggctgcggctgataggcaggctgctgcaccggctgcgctggatgcggagcatgttgcggcggtacctgcgcttcaggcggctgctggaccggttgacgcggctgcgcagacgcataaggcggttggtactggtgttgcgggctcggacgagcagcctcatgctcctgagcgttagccggggcatgattcacgcggtgaacacgaacctcaccaacgccctcatcatcttcgacatcctcgtcataagaatcgtcgtcacgtttactcttcattcgttttaatggccgatcgcggaacatagaagatcgttctttacggctggtccagaaaccatgtaccagtaaagcgattatggcgatcgcgccaacaatgattaatatcagacgcaaatcctgcatcattatattctctgttgttctaacaccttgccaccacggcaaacatttactcactaagagtatttgccgattacctcaagtgcaagtgcactattaactttcacagcacaaagatagatgaaatcgtgctttttgctgttttttcgaacatatcctaactgtccattgcgcaattacccggtaaaatacgcagaattttcctgggattggtcaaaaggagctcatcctgattatggttagtagtttcacatctgccccacgcagcggtttttactattttgcgcaaggctggaagctcgtcagccaacctgggattcggcgtttcgttattttaccgctgctggtcaatattttgttgatggggggcgcattctggtggctctttacacagctcgatgtctggatcccgactctcatgagttacgttccggactggctacaatggctgagttatctgttgtggcctctggctgtcatctctgtgctgttagtgtttggctatttcttctccacgattgctaactggattgccgctccgtttaacggtttattggctgaacaactggaagcacgattgactggcgctacaccgccagataccgggattttcggtatcatgaaagatgtgccgcgaatcatgaaacgcgaatggcaaaaatttgcctggtatctgccgcgcgcaattgtattactaattctttacttcatccctggtattgggcaaaccgtcgcgccggtactgtggttcctgtttagcgcctggatgttagccatccagtattgcgattaccccttcgataaccacaaagtgccgtttaaagagatgcgcaccgccctgcgcacacgcaaaatcaccaatatgcagtttggtgctttaaccagcctgtttacgatgatcccgctgcttaatctgttcatcatgcccgttgccgtttgtggcgcgacggcgatgtgggtcgattgctatcgcgataaacacgcgatgtggcggtaacaatctaccggttattttgtaaaccgtttgtgtgaaacaggggtggcttatgccgccccttattccatcttgcatgtcattatttcccttctgtatatagatatgctaaatccttacttccgcatattctctgagcgggtatgctacctgttgtatcccaatttcatacagttaaggacaggccatgagtaagatttttgaagataacagcctgactatcggtcacacgccgctggttcgcctgaatcgcatcggtaacggacgcattctggcgaaggtggaatctcgtaaccccagcttcagcgttaagtgccgtatcggtgccaacatgatttgggatgccgaaaagcgcggcgtgctgaaaccaggcgttgaactggttgaaccgaccagcggtaataccgggattgcactggcctatgtagctgccgctcgcggttacaaactcaccctgaccatgccagaaaccatgagtattgaacgccgcaagctgctgaaagcgttaggtgcaaacctggtgctgacggaaggtgctaaaggcatgaaaggcgcaatccaaaaagcagaagaaattgtcgccagcaatccagagaaatacctgctgctgcaacaattcagcaatccggcaaaccctgaaattcacgaaaagaccaccggtccggagatatgggaagataccgacggtcaggttgatgtatttattgctggcgttgggactggcggtacgctgactggcgtcagccgctacattaaaggcaccaaaggcaagaccgatcttatctctgtcgccgttgagccaaccgattctccagttatcgcccaggcgctggcaggtgaagagattaaacctggcccgcataaaattcagggtattggcgctggttttatcccggctaacctcgatctcaagctggtcgataaagtcattggcatcaccaatgaagaagcgatttctaccgcgcgtcgtctgatggaagaagaaggtattcttgcaggtatctcttctggagcagctgttgccgcggcgttgaaactacaagaagatgaaagctttaccaacaagaatattgtggttattctaccaagtagcggtgagcgttatttaagcaccgcattgtttgccgatctcttcactgagaaagaattgcaacagtaatgccagcttgttaaaaatgcgtaaaaaagcacctttttaggtgcttttttgtggcctgcttcaaactttcgcccctcctggcattgattcagcctgtcggaactggtatttaaccagactaattattttgatgcgcgaaattaatcgttacaggaaaagccaaagctgaatcgattttatgatttggttcaattcttcctttagcggcataatgtttaatgacgtacgaaacgtcagcggtcaacacccgccagcaatggactgtattgcgctcttcgtgcgtcgcgtctgttaaaaactggcgctaacaatacaggctaaagtcgaaccgccaggctagactttagttccacaacactaaacctataagttggggaaatacaatgttccagcaagaagttaccattaccgctccgaacggtctgcacacccgccctgctgcccagtttgtaaaagaagctaagggcttcacttctgaaattactgtgacttccaacggcaaaagcgccagcgcgaaaagcctgtttaaactgcagactctgggcctgactcaaggtaccgttgtgactatctccgcagaaggcgaagacgagcagaaagcggttgaacatctggttaaactgatggcggaactcgagtaatttcccgggttcttttaaaaatcagtcacaagtaaggtagggttatgattagtggcattttagcatccccgggtatcgctttcggtaaagctctgcttctgaaagaagacgaaattgtcattgaccggaaaaaaatttctgccgaccaggttgatcaggaagttgaacgttttctgagcggtcgtgccaaggcaagtgcccagctggaaacgatcaaaacgaaagctggtgaaacgttcggtgaagaaaaagaagccatctttgaagggcatattatgctgctcgaagatgaggagctggagcaggaaatcatagccctgattaaagataagcacatgacagctgacgcagctgctcatgaagttatcgaaggtcaggcttctgccctggaagagctggatgatgaatacctgaaagaacgtgcggctgacgtacgtgatatcggtaagcgcctgctgcgcaacatcctgggcctgaagattatcgacctgagcgccattcaggatgaagtcattctggttgccgctgacctgacgccgtccgaaaccgcacagctgaacctgaagaaggtgctgggtttcatcaccgacgcgggtggccgtacttcccacacctctatcatggcgcgttctctggaactacctgctatcgtgggtaccggtagcgtcacctctcaggtgaaaaatgacgactatctgattctggatgccgtaaataatcaggtttacgtcaatccaaccaacgaagttattgataaaatgcgcgctgttcaggagcaagtggcttctgaaaaagcagagcttgctaaactgaaagatctgccagctattacgctggacggtcaccaggtagaagtatgcgctaacattggtacggttcgtgacgttgaaggtgcagagcgtaacggcgctgaaggcgttggtctgtatcgtactgagttcctgttcatggaccgcgacgcactgcccactgaagaagaacagtttgctgcttacaaagcagtggctgaagcgtgtggcagccaagcggttatcgttcgtaccatggacatcggcggcgacaaagagctgccatacatgaacttcccgaaagaagagaacccgttcctcggctggcgcgctatccgtatcgcgatggatcgtagagagatcctgcgcgatcagctccgcgctatcctgcgtgccagcgctttcggtaaattgcgcattatgttcccgatgatcatctctgttgaagaagtgcgtgcactgcgcaaagagatcgaaatctacaaacaggaactgcgcgacgaaggtaaagcgtttgacgagagtattgaaatcggcgtaatggtggaaacaccggctgccgcaacaattgcacgtcatttagccaaagaagttgatttctttagtatcggcaccaatgatttaacgcagtacactctggcagttgaccgtggtaatgatatgattagtcacctttaccagccaatgagtccgtccgtgctgaacttgatcaagcaagttattgatgcttctcatgctgaaggcaaatggactggcatgtgtggtgagcttgctggcgatgaacgtgctacacttctgttgctggggatgggtctggacgaattctctatgagcgccatttctatcccgcgcattaagaagattatccgtaacacgaacttcgaagatgcgaaggtgttagcagagcaggctcttgctcaaccgacaacggacgagttaatgacgctggttaacaagttcattgaagaaaaaacaatctgctaatccacgagatgcggcccaatttactgcttaggagaagatcatgggtttgttcgataaactgaaatctctggtttccgacgacaagaaggataccggaactattgagatcattgctccgctctctggcgagatcgtcaatatcgaagacgtgccggatgtcgtttttgcggaaaaaatcgttggtgatggtattgctatcaaaccaacgggtaacaaaatggtcgcgccagtagacggcaccattggtaaaatctttgaaaccaaccacgcattctctatcgaatctgatagcggcgttgaactgttcgtccacttcggtatcgacaccgttgaactgaaaggcgaaggcttcaagcgtattgctgaagaaggtcagcgcgtgaaagttggcgatactgtcattgaatttgatctgccgctgctggaagagaaagccaagtctaccctgactccggttgttatctccaacatggacgaaatcaaagaactgatcaaactgtccggtagcgtaaccgtgggtgaaaccccggttatccgcatcaagaagtaattcttgccgcagtgaaaaatggcgcccatcggcgccatttttttatgcttccgccagcggcggcaaaatcaattcatcgctctcatgctgctgggtgtagcgcatcacttccagtacgcgcaaccccgctcggtgcactgcatcggttaacgccttccctttcagcaagccactgatgagctgagcacaaaacaggtcgccagtccctttcaggtcggtttttacccgactatgggaaatgacattcacgctgtcggcagtgaccaccacaacctgcatctcctgattttcttcattaccggaggcgctggtaaccaccacccattttaatgtgtcactaagcagactttttgcggcagcaatggcactgtcgagatcgcggcaatttttaccggtcaggatttccaactcaaagatattgggggtaattccctgcgccagcggcagtaaatattgtcgatacgcttcgggaaggtcaggtttgacataaattccgctatcaatatcgtcaatcaccggatcgaccatgatcaataggtcaggatggtctttgcgtagcgcagtcagccactcggcaaggattttgatttggcttgccgttcccatatagcccgtggttacagcacgaagttggcgcagcgcatcacgctcctgaagcgcacgcaaatagccgctaaaccattcgtccggaatcgcaccaccgtagaaagtgtcataatgcggcgtattgctcagcaataccgtcggcacggcaaagacattcaggccgttctgtttgatagcaggcacggcaatgctgttgcccacgctgccgtaaaccacctggctctgcacggcgacgatatccgcctgcagtgccctactcttatcgttaaacaacaacaaactactcatttaattttttctccttgccgatgatcctcatcgtaatccaaccgaaactttacctgattctggcagtcaaatcggctatcacaaaacaaggataaggtaattcaatgaagaaaatcatttgtctggtcattacactactaatgacactccccgtttacgcgaagttaactgcccatgaagaagcccgcatcaacgccatgctggagggattagcacagaaaaaggatttgatatttgtgcgcaacggtgatgaacatacctgctatgaagcggtttctcatctgcgtctgaagctcggcaatacccgtaaccgcattgacactgccgagcagtttattgataaggttgctagcagcagtagcattactgggaagccgtatattgtgaagatccccggtaagagcgatgagaacgcacagccttttttacatgcgttaattgcgcagacggataaaacggtgcctgcggaaggaaattaatccgctttgggaaggcatttacaggaggtaacatgaaaaaacgctttatttatcacgatgaaaaaagcaataaattttggtggatagattacgaaggggatagtttagctgtcaactatggcaaggtaggtagtattggtaaattccagacaaaagagttcgataatgaagaacagtgtctgaaagaagccagtaaattgattgccgcaaaaatgaagaaaggctatcaagaagatccaaagtttaacttcatggatcgctactattttgatgatgaagaaattgggttacatgttaaaacgagtcacccaaacttccagtgccattttactgatccactttatatgtgttgctgggatgaagaatctccttttggcagcgatgaaggtgctgatgctctaaacgttcttgaaaatagcctccgtaaagagccggatctggactgtgctgatttccctcaaatgttaattgaaactatgtggggtatgaaatacatcgctatggacagtattcttgaagaggatgttcgtgcgcaattactagtcgatgaaatgagcactatccagagcaatatgattacctacgcaactgcattcggtcagattaaagtcatgggtaaaatctcccataaacttaaaaagatgggactcaatgcactagcgcgtcatcagcttaccgcaaaaattcttcaatggggtgacggtcaggacagtccaatacttcaaaaaatgattgatgaccttacggcgtttcctcacgaaaattaaatactgcatttgtcggcagcaacaactgttaaaaaagtgcgctttgtttatgccggatgcggcgtaaacgccttatccggcctacaaaatcgtgctaattcaatatattgcagaaaccttgtaggcctgataagcgtagcgcatcaggcagttttgcgtttgtcatcagtctccgatgctattaatccttaaatccccgccccctggctaaaatgctcttccccaaacaccccggtagaaaggtagcgatcgccacgatcgcagatgatcgccaccaccaccgcgtcagggttagcttttgccacccgcagtgctccggcaaccgcgccgccggagctgacgccacagaatattccttcccgcaccgccagttcgcgcatggtgttttccgcatcgcgctgatgaatatccagcacctcatccaccagagaagcgttgaaaatccccggcagatattccgtaggccagcggcgaatgccgggaatgctgctgccctcttccggttgcaggccgacaatggtcaccggtttggattgttcgcgcataaagcgactgacgccggtgatagtgccggtcgtccccatgctggagacaaaatgagtgatgcgcccgccggtttgctgccagatttccggcccagtggtggtgtaatgcgcataagggttatcgggattattgaactgatcgagcagctttccttcgccacgattcgccatctccagcgccagatcgcgcgcaccttccatgccctgctctttggtgacaagaatcagttccgcaccataagcacgcatcgccgcacggcgttcctggctcatgttgtcgggcatcagcaatttcatgcgatagcctttcagcgcggcaatcattgccagcgcaatgccggtgttaccactggtggcttcgattaagacatcacccggtttaatttccccgcgcttttccgcctcgacgatcatgctaagtgccgcacgatctttcacgctacctgccgggttattgccttccagttttaaccacacttcactgccgttatccggccccattcgctgcaacttcaccagaggcgtattgcctattgtttgttctaatgtactcacgatctctatccatacgtggtgttgcctgatgcgacgcttgcgcgtcttatcaggtctacaggttacaaaccttgccattaaaaagcccggatcgcgggaagcgcctccgggcgtttaacattcactcaacctatcaggcgctttgtgcgagagcaagttcctcatcgcgggtttcgatacgctcgtcgccgttatacagccgcgcatgttgcagaccaacgaataaacgctcgccacgctgcggggcatcgtcgccatgcatcacgaccgtcagcggttcgttgtaccaccccagcggctgcaccactaattgggtgtagtgacctttcgggctggcttccagtacctgtaccggcagcgggctatcgaggctggtacggcggctgatatccacttcccaagggcgcaggaagagatccaccggcccctgatacgcaggtgtgtagcccagcggccagcgatgcgcgccaacatggaactgcccgccgcgaatggttccctgcaggcggttcacttcgcccataaattcgagcacaaaacggatcgccggttcgcgccatacctgatccggcgcgtcagcctgttcaatattgccctggctcatcacaactacacgatcagctacttcggtcgcttcttcctgatcgtgggtcacaaaaacgctggtgaattttagttcttcatggagttgacgcagccagcgacgcagctctttacgcacctgcgcatccagcgcgccaaacggttcatcaagcagcagaatttgcggttccacagccagcgcgcgcgccagcgccacgcgctgtttctggccgccggaaagctgcgccggataacgatccgccagatgggcaagctggaccatttccagcaattttgtcactttcgctttgatggctgcggcattcgggcgctcgcgacgcggcagcaccgtcaggccaaaagcgatattgtcgaacaccgtcatatggcggaacagcgcgtaatgctggaacacgaaaccgactttacgatcacgtgcgtgcaggcggctcacgtcggtgccgtggaagcgaatatgcccgctggtttgatgctccagcccggcgataatgcgcagcagcgtggttttcccggaaccggacggccccagcaacgcgaccatctgaccactaggaatatccagactgatatcgttcagcacctgggtgcgaccaaagctcttcttaatattggcaatctcaatgctcatgatgttcctcctgctgtgcgcgtttttcctgattctccaggcgccactgcaacatactttttaaaaacagggtgataatcgccatcagcgttaacagcgccgcagcggtaaaggagccgacggtgttgtagtcctgctccagcaattcaatctgtaacggcaggctcagggtttcgccgcgaatgctgccggaaaccacgctcaccgcgccaaactcgccaattgcgcgggcgttggtcaacaccacgccataaagcagcgcccagcggatgttcggtaatgtgacgcgacggaacatctgccagccggacgcgccaagcaaaatcgccgcttcgtcttcctggctgccctggcttaacatcaccggcaccagttcgcgcaccacaaacggacacgtcacgaagatggtgaccagcaccattcccggccaggagaacataatttgcaggttatgctcgtcgagccaaccgccgagcgggccgttagagccgtagaacagcaaatacaccagaccggcaaccaccgggcttacggcaaacggaatgtccagtagcgtcagcagtaactggcgtccagggaagttaaagcgcgtcaccagccaggccagcagaatgccgaacaccaggtttaccggtacggcaatcagcgcgatcatcaccgtcagccagatggcgtgcagcatgtccggatcggccagattctgtaaaaccggcatcagccccttgctgaatgcctgcacgaagatgtaaatcatcggcaccagcaggatgaacgcgctaaccagcatcccgatgccaatcagaaaccatttgccccagttaatcgggcgcgcgtcataacgcttcaattgggtaacttccgccattaatgacctaccacacgccgaccaaagcgactttgcagagtgttaatactgaacagcagcagcagagatgccgcgaggatcacgctagcaatcgcgctcgctgccgggtaatcaaactcctgtaagcgcacaaaaatcatcaggctcgtcacttccgtcttccacgcgatatttccggcgataaaaatcaccgcgccaaattcaccaagactacgggtaaagctcagcgccacgcccgccaccagcgccggagaaagctccggcagcaccactttgcagaaactctgccagcgcgttgcaccaagcgtttccgccgcttcttcatattccgggcctaactcttccagcaccggctgcacggtacgcaccacaaacggaatgctggtaaaggccatagccaccgcaatccccagccatgtataggtgactttgatatcaaacttcgccagccattcaccgtaaaaaccgtttacggaaaagaggctggccagcgttaaaccggcgacagccgttggcagcgcaaagggtaaatccatcagcgcatcaagcagcgtgcggcctgggaagcgatagcgggttaggatccacgccatcagcagaccgaaaacgccgttaaaaatgcttgccacaaacgcgctcagcagcgttactttgtaggccgcgaccacctgcgggttggtgatcacctcccagtactgcgcccagctcatctgggccagttgcatcaccagcgcggagagcggcagcagcaaaatcaggcacacaaacagcagactggtgccgaggcttaaggtaaagcccggcagcacgcgtctggaggagacagcaaacatcagttacgccccgccgctaacagcttgtctaactcgccgccgctggtgaagtgggttttcatcacttccggccaggagccaaatttgtcttccacgcggaacagctcggtctgcgggaatttgtctttcagtttgtccatcacctccgggttattcacgcggtagtaatagtcggtgatgatggtttgcgcctgcgggctatagagccagttcagataggctttggcggctttttccgtaccgttggcctgcacgtttttatcaacccacgccaccgggaattccgccagaatgttggttttcggaatcaccacttcaaagccctgcgcttcatactgtttacggatgttgttcacttcgctttcgaagctaatcagcacatcgcccaggccgcgctcggcaaaagtggtggtcgcgccacgaccgccagtatcgaacacttcaacgtttttcaggaactgggtcataaactgttcggttttgcctttgtcaccaccgtcagctttatccgctgcgccccatgccgccagataggtataacgcgcgttaccgctcgttttcgggttcgggaaaatcagcttcacgtcggagcgcaccaggtcgttccaatcgtggatattcttcgggttacccttacgcaccaggaagcccatggtggagtagaacgggctgctattattcggcaggcggctctgccagtcggccgggatcagcttgcctttatcgtgcaggatttgtacgtcggtcacctggttataagtgacaacgtcggcttttaagccctgtaaaatcgccagcgcctgtttactactcccggcatgagattgttttatcgtcagtttgtcgccgccgttatcttttgcccattgttgctcaaacggcggattcagggcggcaaacagctcgcgggagacgtcataagaactgttcagcagttccgttgcctgtacatggcccgccagcagcagagaagcgaccagcgcgagactgttctttttcagtaagttaacggccattgcgcacccttataaatttaatgactttctaatagccatcatatttataacggacgtgaaaggagtaacggttttatataccgtttggtgatttggaagttgaaaagggaataagaacttggttcaacaggcgtaattgttgcagtcagtttggacacgaacagcgcggagaaaccggagcgtacacatagtacgtgaggatttcgagcactgcccggggccaaaatgacaaataaaatagcctggtgaacttagttcaagacgaaatcctccccacaaatgcagggaggaaacagaggtgaatcagataccgacgctaaccgtctccggcagtgtgctgccgccatcaatcacattctgtgtaccggttaaatagctggattcatcgcttgcgaggaaggccgccagttcgccgacttccagcggatcggcgaggcgacgcatcgggattgctttcgccatttcagtcagcacgctctctggatcttccgggttgctctggcgggcaatgctttccgccattggtgtgcgcacgtatcccgggcaaatggcgttaacgcgaataccagactgcgcgtactccaccgccaggctttttgtcaggccaacaatcgccgctttcgttaaggcgtacgccgtttcgccaggatcggccaccatatcaccagtgacactagacatcatcacaatgcgaccatctttgcgggcaatcatctccggcagcaccgccttcgtgacgttccatacgcctttaatattgatgtcaatatggaaatcgcgatcgtcatcgctcatatcgaggaaactgcccagacgacaaacgcctgcgttattcaccaggatatcaatgcgcccttctttttccttcgcgcgtttgatagctgcggctacgctcgccgggtcacgcacatcggcgacaaccgccgtacagcgatgaccacgaccacacagttcgtccgccagcttttcgatctcaggggagatatccagcaagattaggttcgcgccatgacgtgcaaaagttctggcaattccttcgccaattccctgcaatgcgcccgtaatcagtgctgtcttgcccgtgagtttacccattttaatgctctccttgttaatacagagcgttacactccattccctctgaaaatacaggataaacaaaatattgctgcggatcagctcactaattcaggaaaatctcaatccagtcgctgctttatgcatcatttcaggcgttgtgttagctcactgctgcgctgaatcattttcaaactctccacatcattgagttgcacaaggccaacaaacagtaaatcggtaacagaattttgcgccgtgcgggtagacatgctgctgctacgccattcggtttctccggaaacggtatcgagggtgaaatgcgccagccgccgcagcggagagtcagtcagagaagtaatggcaatcaccgttgccccctgctttcgtgccgcttctgcgcacaagacaatctcttttttactgccgctgtaagagatagcgatttgtacatcgccttttttcaacgcctgagaaacggtggcttgtacgtgcgtgtcggcttcgcaggccacgcgatagccaattttcatcagtttgaagctcagatcgcgccccaccagcgcgcttccgcccaggcccgttatctggataaacggtgctttactgatgacctcaatgattttttgcagccgcgcgtaatcgagcaacgcgcaggtttgctccagcgccagctctttttcgcgattcagtttgcgcgcgatcacttccaggctatcatcactggtaatgctactgtgcaggtgcagtgccgtggcattcgttttctcccggctggcactgtattcgcctattaacgccatacgcaattcagtaaatccttgcgcgccgagtttttgggcaaatttcactatgctgctctggctaatgccgagctgtttcgccatctgccgactagaaacggattgcagctcactcacgttggcctgcagaaagtcagcgattttttgctcgttttcggtgaattcactccccgcattgcttattttcgtcaggtacaacatcttccactctcctgggctggcagcataaattccgcttaagttcttatgacgctcttcacactctgcgagtgtagactcaatgattcctttaagcctgtcaattcgggatatatgattccatacatctgcaattatttgatcgtaaatagtaaggtcaccaccgatgcaatttgaaaagatgattactgaaggcagcaacaccgccagcgctgaaattgaccgcgtaagcacgctggaaatgtgccggattatcaacgatgaagataaaaccgtaccgcttgccgttgagcgcgtactgccggatatcgccgcggcgatcgatgttatccacgcccaggtaagcggcggcgggcgtctgatttacctcggtgcgggaacatccggtcgtctggggattctggatgccagcgaatgtccgcccacctacggcgtgaaaccgggtctggtggttggtttgattgctggcggcgaatatgccattcagcacgcggtggaaggcgcggaagatagccgggaaggcggtgttaatgatctgaaaaatattaatttaacggcacaggatgtggtggttggcattgctgccagcggtcgcacgccgtatgtgattgccggactggaatacgcacgccagctcggctgccgcacagtgggaatttcctgtaatccggggagcgccgttagtaccaccgctgagtttgccattacaccgattgtaggtgccgaagttgttaccggttctagccggatgaaagcaggtacagcgcagaaactggtgctcaatatgctttccaccgggctgatgattaaatccggcaaagtgttcggcaacctgatggtcgatgtggtcgccaccaacgaaaaactgcatgtgcgacaggtcaatattgttaaaaacgccaccggatgtagcgcagagcaagcggaagcggcgttaattgcttgcgagcgcaactgtaaaacggccattgtgatggtgctgaaaaatctcgatgccgcagaagctaaaaaacgcctggatcaacacggcggctttattcgtcaggttttagacaaggaataacccatggccaaagagatcagcagtgaacttctgaacaccattcttacccgtgtcggcggaccgggaaatatcgccagttgtggtaactgtatgacgcgcctgcgtctgggtgtacatgacagtagtctggttgatcccaatatcaaaacgctggaaggcgtgaagggcgtcattttgaccagcgaccaggtgcaggtcgtttttgggcctggtaaagcgcatcgtgccgcaaaagcgatgagcgagctgctgggagaagcaccggtacaggatgccgcagaaatcgccgcccagaacaaacgtcagttaaaagccaaacaaacctccggcgtgcaacaatttctcgccaaattcgccaccatcttcacgccgctgatccccggttttattgccgccggtctgctgctggggatagcgacgttaattgccacggtgatgcacgttccggcagatgctcagggaacactacccgatgcgctgaattttatgaaggtgttcagcaaaggtttgttcactttcctggtgattctggtgggctataacgccgcccaggcatttggcggcacgggcgtaaatggcgcaattatcgccgcgctctttttgctcggttataaccccgcagcgaccaccggttactacgccggttttcacgatttctttggtctgcccatcgatccgcgcggcaatattatcggcgtgctgattgccgcgtgggcctgcgcccgcattgaaggcatggtgcgccgctttatgccggacgatctcgacatgctgctgaccagcttaatcaccctgctgatcaccgctacgcttgcgtacctgatcattatgccgctgggtggctggttattcgaaggtatgagttggctgtttatgcacctgaacagtaatccgttcggttgtgcggttttagccgggctgttcctgatcgccgtggtatttggcgtgcatcagggctttattcctgtttacctcgcgttaatggacagccagggattcaacagcttatttcccatccttagtatggcaggcgcgggccaggtgggcgcggcgctggcactctactggcgggcgcaaccgcacagtgcgctacgcagtcaggtacgcggggcgattattcccggcctgctgggcgttggtgaaccgctgatttacggtgtcaccctgccccgcatgaagccgtttgttaccgcctgtttaggcggcgcggcgggcggtttgtttatcggcctgatagcctggtggggtctgccgatgggcttaaacagcgcctttgggccgtctggtctggtagcgctgccgctgatgacttccgcacaaggcatccttccggccatggcggtttatgctggcgggattctggtggcatgggtttgcgggtttattttcaccacgctctttggctgccgtaacgtcaatctggactgatatcatgaaacggacaatgctctatctttctctgctggctgttagttgtagcgtcagcgccgcaaaataccctgttctgacagaaagcagcccagagaaagcagggtttaacgtcgaacggcttaaccagatggatcgctggattagccagcaagttgatgtcggttatcccagcgtaaacctgctgatcattaaagataatcagattgtgtatcgcaaagcctggggagcggcgaaaaagtacgatggcagcgtgttgatggaacagcctgtcaaagccaccaccgggacgctgtatgacctggccagtaacaccaaaatgtacgccacgaacttcgccctgcaaaagctgatgagcgaaggcaaactgcatcctgacgatcggattgcgaaatatattccggggtttgccgatagtccaaatgacaccattaaaggcaaaaacaccctgcggatttctgacctgctgcatcacagcggcggtttcccggcagatccgcaatacccgaataaagcggtcgcgggcgcgttatattcccaggataaaggccagacgctggagatgatcaagcgcacgccgctggaatatcagcccggcagcaaacatatctacagcgatgtcgattatatgctgcttggatttatcgtcgagagcgttaccggtcagccgcttgaccgctatgttgaagagagcatttatcgcccgctcggcctgacacatacggtatttaacccgctgctgaaaggctttaaaccgcaacaaattgccgccacggaattgaacggcaatacccgcgatggcgtgatccatttcccgaatatccgcacctccactctctggggtcaggtgcacgatgaaaaagccttttatagcatgggcggcgtttccgggcacgcaggtttgttttccaataccggcgatattgcggtgttaatgcaaacgatgctgaacggcgggggctatggtgatgtgcagctgttcaatgcggaaacggtgaagatgttcaccaccagctctaaggaagatgccacttttggcctcggctggcgcgtgaatggtaatgccaccatgacgccgacgtttggcacgctggcaagcccgcaaacctacggtcacactggctggaccggaacggtgaccgttatcgatccggtgaatcatatgacgattgtgatgttaagcaacaagccacatagcccggttgccgatccgcaaaagaatcccaatatgttcgaaagcggtcagttgccgattgcaacttatggttgggtagttgatcaggtgtatgcggcgttaaagcagaagtaataaaaaggccagtcagtaatgttactggctggtctgagagtgctgacaaacgcaaaactgcctgatgcgctacgcttatcaggcctacgtggagcccacaatatattgaattagcacgatttcgtaggccggataaggcgttcacgccgcatccggcgtgtacaacgcgcacttggtcaacaatctgaggccagtcagtaatgttactgcctggcctttaatcaatgaatcagaaacgcttacagcgccatcaacttgtccaggctcggtgcgaaataatagccgccggttaccggtttggtgaaacgcaacatcgcatcacgcttaccatcggtatcgccaaacatgctcagcagttgctgctcaatgttatgcagacgcgcgcagtaggcgcagaagtacagaccgtgagtgccactggcagtgccgtacggcaggctctggcgaacaatcttcagccctttgccatcttctttcagatcaacgcgggtgaggtgagaggtttccggacgttcgtcgccgtcgatctcttcgttggcctctttggtgcgcccgatcaccatctcctgatcgtgaacgctcatccggttgagctgcttcaggttgtgttcccaacgctggacaaacacatagctgccgcccgcatccacgccgtctttgataaccgccacttcgcgacgcgtctcttcacccgccgggttttccgtaccgtcaacaaagccgctcaggtcacgctcttcaacccaacggaagccgtggatctcttctttcacttcaatgcagtcaccaaaggcttccatcgccgcctgggcgacagagaagtttacgtcgtgacgcagagaaagaatgtggatcaacacatcgaactgggtcgtcggcgcaaggcctttaccgtagcccggaaaatctttcagctcttctgccccaacgccgccgctcagagcgcgccaggtgttgttaccaaaggcaaccaccgcaccaagatgcgcgtccgggaatttcgcttcaaaagttgccagtttgtcggcaaatgttttactggccgcacgcagggcgtcaacttcccctttcacgttggcttcgatccaaatcgccgcgcggcaatgttctggcaaaatgccactctgaacctgagacattgttcctcctgaaaataataatgccacgcaatccgtggcattgttgagcgctattttacgtgttttttcgcggcggcggtttgttcagacgcaaattaacgccgccagataattttactgactttccagtttttcagggtatcgtcgctaggcattaacccttcaggaccacgccattccccgctgaactggtagctaatatgttgactgccttcggctttacattcgacggcacgattatcatcaccatcagctttttggcaattgccaaatgctttgctgtaaaggtcgctaaacggtgtaccgattttaacaccggtgtcagcaggaatatcgctatccagcacgtcaatgcgactgatcgtgccttgatcgccgttaatcaccatcgccacgttgtcgcccttcatcacttcaaaaaagcgcaccacgttgccgttcgcggttttcattccgctgcgcaggcgataatcgccatcaagcgcatcggcaatggcttgttcttgcagtggtgtggacgccgttaattcacccacgccctgctcgctcactttggtggagctcccaaaccagttccacgggttagcggcagaccagttaacactgctcatcgtggaacagccggtcagcatcaatggcatagcgcataacattaaacgcaggcttttcatgtcacttcctttggttattcaataacgttgcttggagtgcaaattcaccaaaaagtgccgttattcttttacttcataaaaacaagcgcgtaaacgtcgattggtcagcagccagattaacgccacaatatccgccactaccagcgccagaccgataccgctaacggattcaccgttcagccacagccacggttgccagcaaagtaaaaccacctgcgccaacagcaacagaaaatagagtacacgccaggtgcgaggaaacgtagcccgccgaccgctcaacaaaaacgccagcaccgccggaatgccaggaatcagccccagccagaaattatcgtgatcgggataaaacagatttagcagcgcagtaccctgctcgcggctcgcaccggcaatgacaaacagcacccaggttcgcgcctgaagcaatagcacaagccagaagagcaagggtaaacgcaggcgaccgtgcgcatcataatggacaggatgaaactcagtactcttcatcttcaatcaaacgcttacccagactcagcacgtcggcgtgttcatatcccaggcgttcatacattccgagcaccatgtcgttatcttccggcacattgatctgaattttcgggcagccacgagcaatcagctttttctccagccgattaagcaacgcattggcaatcccacgcccacgaaactctggatgcacgccaagataataagcagacccgcgatgcccgtcataaccgcccatcaccgttccgaccacgtcaccgtttacctcagcgaccaaaaacaaactgacgtcatggttcatcttacgctcgatgtccatttccggatcgttccacggacgcagcaagtcgcaacgctcccaaagggtgatgacctcttcgaaatcttcctggcgaaatacgcgtatctccatggtattcgttacctttttgcgggttaaaaggctgattatggcgtgaacggtcgaattagccaatatctgacgaaaatcggttgaaaaagtggcataatggggagttgtcaactattgaaatgaaaagtaaaacaattctcaacagcaaaccgtcgtaacggattacgcgatacgatataacatctggaactttattattacaactcaggccgtatgagcacttttaaaccactaaaaacactcactagccgccgccaggtgctgaaagccggtttggctgccctgacgttgagtggaatgagccaagccatcgccaaagacgaacttttaaaaaccagcaacggacacagcaagccgaaagccaaaaaatctggcggcaaacgtgtcgttgttctcgatccaggtcacggcggaattgataccggagcgatcggacgcaacggtagcaaagaaaaacatgtggtgctggcgattgctaaaaacgtccgttccattttgcgtaatcatgggattgatgcgcgtttaacgcgttctggcgatacgtttatcccactttacgatcgcgttgaaatcgcccataaacatggcgcagatctgtttatgagtattcatgccgatggctttaccaacccgaaagctgccggtgctagcgtatttgccctctctaaccgtggggcaagtagcgcaatggcgaaatacctgtctgaacgcgaaaaccgcgccgatgaagttgccggtaaaaaggcgactgacaaggatcacctattgcaacaagtgctgtttgatctggtgcaaacagataccattaaaaatagtctgacgctcggcagccatattctgaagaagattaagccggtgcataaactgcacagccgcaacaccgaacaagcggcatttgtggtgttgaaaagtccgagcgttcctagcgtgctggtggaaaccagctttatcaccaacccggaagaagaacggctgttaggcacggcggcgtttcgtcagaaaatcgccacagcgattgctgaaggcgtgatcagttatttccactggttcgacaaccagaaagcacatagcaaaaagcgataagttatgaaacccgacgcacaccaggttaaacagtttctgctcaaccttcaggatacgatttgtcagcagctgaccgccgtcgatggcgcagaatttgtcgaagatagttggcagcgcgaagctggcggcggcgggcgtagtcgggtgttgcgtaatggtggtgttttcgaacaggcaggcgtcaactttagccatgtccacggtgaggcgatgcctgcttccgccaccgctcatcgcccggaacttgccgggcgcagtttcgaggcgatgggcgttagtctggtagtgcatccgcataacccgtatgttcccaccagccacgcgaatgtgcggttttttattgccgaaaaaccgggtgccgatcccgtctggtggtttggcggtggcttcgacttaaccccattctatggttttgaagaagatgctattcactggcatcgcaccgcccgtgacctgtgcctgccatttggcgaagacgtttatccccgttacaaaaagtggtgcgacgaatacttctacctcaaacatcgcaacgaacagcgcggtattggcgggctgttctttgatgacctgaacacgccagatttcgaccgctgttttgcctttatgcaggcggtaggcaaaggctacaccgacgcttatttaccaattgtcgagcgacggaaagcgatggcctacggcgagcgcgagcgcaatttccagttatatcgtcgcggtcgttatgtcgagttcaatctggtctgggatcgcggcacgctgtttggcctgcaaactggcgggcgcaccgagtctatcctgatgagtatgccgccactggtacgctgggaatatgattatcagccaaaagatggcagcccagaagcggcgttaagtgagtttattaaggtcagggattgggtgtaactccctcacccccactcccgcatccgctgatgcagcgtcagactcggcttctcggaaaacagctgctggtaatccgtggcaaattgccccagatgccagaatccccactgcatggcggcgtcttttaccgtcatactttggctccacggacttatcagttcgcggcgtacggcgttcaggcgaatgcgtttcagccacgcgttcgggccaatgcctaaaatagcgtgaaacgcgttttgtagcgtgcggcggctgacatgcagttgattacacaaatccagcaccgtcaccggttcggacatgttttccagcacatattcacgggcgcgggaaagcaatcgacggtaactctgatgactgatgctttccgccgtcaccattggttgcgcttcttccagcatggcccccatcgccattagcaaattatcccccagcacttttcgcactgcaggctgatggagattttccggattctcgcaaaacgtcgccagcgcctgttggacaaagccccacagcgcggctttatgctgctctttcacttccagcgcgctctggttacgcaacatatgtaatacccgatccgggttatgcaaaaagttagcctgccgggtgatgacatcttcagaaagcaccacgcccaggatcgtgtaatcatccggcgtgctcagttcaaattcagtgccaccagggcgggtggcgatttccgcgcttcccagacattggctaccgataaatccctgctcaccgcgcgtcgccggaatgccaaaccagaagctgttcggccagaccaggcagctctgacgcagcgccagaccggtgtattcacgaaaaacctgaatatcatcgagtagaatttccgtaaattcaccatgaaacttgcccggatgcagctgatcgtaaatctgctgccaggcggtaatcgttaaagcatgttcatagacatccgttgtctgtcgttgatgaacattatccacttcgaccttcggcgtgagcttcaggttttcgggtaagggttcatgataaagatggtgcaaattggctgtacgggtctttttcatgatgttaatgccgggtgttgtaggacacccggcacctccgacaggttaatggggcttgagacgataacgactactgcgtttacgtaacgtcccggcagaaaagagctgttcgagcgcatttctggctttttccagcggccagccaaagtgggcagccacttctcctgccgtcattccctgacgtacacttgttaacagcgccaacaactcgtcagcagattccgcgacgataactggcgcgtcgggttcccttacgggttgcttcggctggcggttaaagccagtaaccagccactgggtgtcatcgtctggccgaccgatctccttgcggctgatgacacgcccggtacgcatcgcggcagcacaacctgcgtccagcgccgcacgacacgccgccagatcgccttccaccaccagcgttaagcgaccagggtcaagcacttcgtgactgagcagacgaacgttagctgctttgagcatggcatccgctgcatctatcgcggcgaccatgccgtccacttccagcaatcccagtgcattgatcatcggcaacctccgttacgcacgctggattggattacgcgcgatttccagcactgcatcggtaaaggcgttacaggctgctttacacgctgcctggctaccggttaaaaatgctgcgctgtagttggtttcagacggtggcgggacataggtcgccagctgtacgtcggcagacttcagggctgcatcaatgccataggtcgcttccagcggcggtgccaccagatacgccatcggatcgccaagcgtgatcccggcggtactactgagataagaaccggtacggctaactacatgtgccaggaatgccgtatcttgcgcgtcattagcccactggaaagctgcgccattttcaatatgcgcaatcatcgcatccagacctgcacgcacttccgccgggtttggcccaccaagcataatcagcacttcaccggcagtcggactcgggccgtgtgcagcgcccgcatataggctgcggccatacaccacttccaccatcgcctgcttggtcgcttcatcagcggcaatgtaggtgacgtcatcggagtcggcagaaatcagaccgaggctacgaatatgcggcggcaatttcagttcacgcgcaaaatcggcgttaacggaggcaatcacccgcatagcggtgacagacggtcgaatcaaatctaaagctggcatgatgcctccttatcgggtcatgttgatgccggatgctttctgctccagcatacgtttcgccaaatccacaatgacggctgcggcttcaaccggcggcgtgccgccctggtgaatgttagagatacaggtgcgatcggcctcaacggtggtcgccatacgcgggctgtaaacggcgtagcaggagaggctttcactctgacccaaccccggacgttcgcccaccagcaggatcactactttcgcgccgaggatctcaccgatctgatcttcaatcttcacgcgaccataacgaacaaagaatggtgtaccgactttcagcccggcctgtttcaggcccgccatcagcggtggcaggatctcttcgtagttcacggtgatcgcatcagtactcaggccatcagaaataacgacctgtacgtccggattggcaacacactgcgctttcagcgcttcaacagcttctgcacacaggcggcggcccatatccgggcgagtcaggtagagatttttgtcgctaatttcagagcgtacttccagcaagccctgcgctttcacccactcttccggcacttctttcagtacggtatctttgctacgagagtgatcggccaggaaacgcagcagcgcctgcgtacgtggacgcggaccggcacgaccggtacaaacgcgggccacggtgctgcggcgcagttctgttaatacgtctgcgcgatgcggattttcaacaccaatccacgcttttgcttcagcggaacctaaatccagcgcacagctttcgctggtcaccggtgccgcacagttggtggtggcgcactttgcttcactcggcgcgggggccgcttgtcccatactcgccatcacgctgcgtacaatttcttcaatctgtttttgatccatgatatgttatctccgcgtcatcagaagaacagactcggatcgcccgcccgtttggtcaggcgaccgtttgccataatgcccatgctttccagccagcgttcaaactccggactcgggcgcaggttgagtaactgacgcacagtggcggtatcgtggaatgcggtggtctggtagttgagcatgatgtcatcacccagcggcatccccatgatgtagttgcagcctgcggtggcgagcaggatcatcaggttttcgttgaggttctggtcagcgtcagcgtggttggtataacagcagtcacagcccatagagatgccgctcagcttgcccataaagtgatcttctaagccagcacggataatctggcggtcgttgtagagatactccggcccaataaagccgaccacggtgttgacgataaacggatcgtaatgacgcgccagcccgtagttacgtgcttccatcgttacctggtctgcgccgaagttagcgccagcggatagcgcagagccttgtccggtttcgaagtagaggcagttttccccggcgatacggttgaactccgcgcccactgcgcgcgcttcgtcgagcatcgccagctccacgccaaactctttcagccctttttcgctgccacagatactctggaaaatcagcccgcccggtgcgccacgacggatcgcttcgatctgggtggtgacgtgcgccagtacacagccctgagttgggatgttgaatttgtcgatcacgccatagatggtatccaacacgcggcttaagttttccacgtcgtcagtcaccgggttaacgccgatcaccgcatcgcccaccccgaaggaaagcccttcgtagatttgcgcggcgatactttgcacgtcgtcacgggtgtcatttggctgcaaacgggcgctaaaggtgcccggaataccgatggtggtattggcctttttgattaccggcattttcttcgcgccgtagatcaggtccgcgttggagcaaatcttcgctaccgccgcgaccacttcgctggtcagccctttgcgggtaaaggcaatgtcgtccacgctggtttcatcgctcagcacatactcacgcagttcgctgatgctccagtttttaatctggttgtaggccgtttcgttaacatcgtcctgaatcagccgcgtcacgcagtcatcttcataggcaatcaccggattattgcggatgtccgctacggtcatttcgctcaacacctgctttgccgccacgcgctcctgactgcttgccgctgcgacgcccgccagcacatccccgctacgcagttcgttggctttagccagcacctcttttacatccttaaactgatatacattgccgaacaatgtggtctttagtttcataagtcgttccctcaggaaggaaatgcgagacttttcaccgtcaccggcacaacgcttccgccaaaaagaggcgtaccaatgtcgatatagtcccccgcgcggacaatcacttcgtcaatgactgccaacgggagttgttgtagctgtgggcgcaacaacatgcccagagctttaccaaagtcctgcccggccaccaccagcaggggatgcggattcggaaaacgcgcgacgaaatcgaccaacgcgttgatgaccgtcagtaccgcggcgtaacgcacaggcaggctggcgggaagcgccagcacgtacgcgtcagttttgggatcaagatccagctgaatcagcgcctgttgccaggcccccaccagatccgtttcatcaatcgggatcgccaccggcaaattgcgcagcggcagttgtacgccctcaagccagattgtgctgccagagaggctaagggtatgcgcgcccgcgccaatcaccgtggcgcgcacggtttgcgccggaaactgtacgttcatctcacgcaggcgcggatggtcatgcagcgcagttgccagcagcgggccaatatcggcaaaacagaacgggtcggcgggctggtggcgataacattcgcccacgccgccagaaagcgtaatgatttcgggcgtaacacctgcgggcagcaaaccggtttgcatcaatgcctgcgcgagcggactgagcgttccgtcaatcacttcgacaatcagttctgccatccgccgggtcacctgcaccagctgcgcgccggtcaggctacgggcgtcggtgcctgcaccgaagcactcatccacaatcatctgccccggtttatgagcgtaaaccacgcgcccgtggctgtcggtttccagcaggcgaccaccgacgttgaggcaggcagtgccgctgatttttccggcatcgaacagggcgtagttcgcggtgccaccgccgatgtcgatattcagtacccgacacagccgttgttcagaaagggtttgtgccccggctccgtgaccggcgatcacggattcgaggtgcggcccggcgctggcaacgacaaaatcgcccaggctctgagagagcgccatcaccgccgggcgagcattgcgggttttcgcgctttcaccggtgatgatgatggcaccagaatcaacgctttccggctcaatacccgcagcatgatattgctcgagtattaaggttttcagttccgcttcttttaaaccgccctgtttatcgacaggggtaaagaacaccggactttgccagctaatttcgcgtttaatgaattcgtagcgcggcacctggctcaccgccgcacggttaaccagctccagccgggagaaaatcacctgggtggtggtggtgccgatatcgataccgacgctcaatagctggcgagtgttcacgattgtgcctccgcttcggtttaagtcagctttgtgcctccgcttcggttttagtcgcggtcgcgtcttcttttggcaccagcatcatcgccacgccaatcgccgttacgccgccgatcaacttgccgacaatcatcgggaagatcatggcgttcatgttggcagcggcgaagcctaagtggtcgcccagggcgaaagcagcggaaacggcgaaggcgcagttgatgactttgccgcgggtatccatctgcttcatcatgccgaacatcgggatgttgttggcaagcgttgccaccatgccggctgccgcgatgttgttcatattcagtactttaccgacgctcatcagcggtttttcaaaccagcgagtcagcagcagcaccatcggatacgcccctaacagaacgcaggagatagaaccgataacttcaatggcgcgcatcacctcaccgggtttatcgccaggggccataaagataggatccagaccggggatcagttcccagccaagcaggaatttcactaccgcagcggcaagaccgagggtgatcaatgcaacgaggaatttggcgaagatctggaagccgttgatcattttttccgggatgaatttcagccccagcgccaccagaatcgcaacaatgatcaccgggatcatgttcatcaggatcagggcgaaagtgaattccaccggctggccgttgatctgcacaccggagtacatagcaaccagaccaccagcgatacaaccaatcggaatggtcacaatgcccgccagcacgccgagcgccagataacgacggtcagaaggttcgataatgccgagcgccaccggaatggaaaacacaatcgttggccccatcatgctcccgagaattaacccagagtatagccacgcggctacgtcgccgcccgccagctctttggcgaggaagaagccgcccatatcgcacgccagcagtgttccggcgaacatgcttgggttagcgccgagcatttcgtaaaccggaataattaccggcccgagaacgtgagccagtaccggtgccagcgcggtcataccgaccatcgccaggcccagtgcgcccattgccataaagccttcttcgaactgaccgccacttccttcgatacttttaccgaacttaccgaggaaacgagcagaaccgccgaactggctcaggatcctgtctacggcagctatcagcataaagaacatcatgatgtacatgatgatttcgttaattcccatcgcctttactccctgttagttgttatttattggcggatgcggcgtaaacgccttatccgccctacatgtgcaatcccgtaggctggataagacgcggcaagcgtcgcatccggcaattgcaccgcgccactggcggatgcggcgtgaacgccttatccgccctacatgtgcaatcccgtaggctggataagatgcggcaagcgtcgcatccggcatttattgcgccgctgcgtacaggccgacaatctgctccaggctggcggtacgcgggttactgcgcagacaaatatcttccagcgcggcctgcgcccatgcgccgtaatgcgcagatgtcgcaccaacatcgcccagtcgtttaccaatcccaacttccgcaatcagctcacttaccgcgttaatagcgtcacgatcgtcggattttttagttcgcagtgcccgaccaatctgactaaagcgttcacgacaaaccatccggttaaattccatcaccgttggcagcaacatggcgttcgcgagaccgtgcggaatatgcagcgccgcgcccggctgatgcgccatcgcgtggcacaacccaagacccgcactggaaaacgccattcccgccatacaactagccagcaacatgctctcgcgcgcggcaaggtcgtgaccgtagcccaccgctttcggcaggcttttgccaatcatcgcaatggcaccaatcgccagactgtcggtaaacggtgtagcgttcagggcgctgtatgcttcaatggcatgggttaacgcatcaatgccggtcatcgccgtgacatggctcggcacaccttcggtcaatgcggcgtcgaggatcgccacatccggcatcaggctggcatgggctaacacctgcttgcgcccgctcaccgcgtcgataatcaccgttacattggtggtttcagagccggttccggcggtagttggaatggcaatcagcggcaagcgcggttgcagaacgctggtttcactcatctctgccagcgtgctatccgggttcgtcaccagcaacgtcacggctttcgccgcatccagcacgctgccgccgccaaacgcgatcaccccatcacagccactctcacgcaactgcgccacggctgcacacacgtcggtaatgcacggttcgcccaccggacatggccagagcgtcatggcgatacctttaacggtcaggctacgcgtcagcccggcggtcatccctgcctgatgcaaaaagctgtctgccatcacgaacagatgtttcagcccacgcgtttgcgcttgctgtccgcaactgctcacgctgcccggaccgcaaagcgtcaccggtggaacgctaaatgtttttacccgttgcagattcagggtatcgaacgcctgaaagagcgcggtctgcaattcattttgcatatagcccctccgctttctctcgcccactactggcgatcgccagcggggtcataaacaaactgtgctgcggtaaatgcacctgtaacgccgggaattgtttgcgaaacagttccgccacgcccggttgcatacaagagccgcccgccagccataaatcagtaatgccctgcccttcaatatgccgggcgacaatgtccgccattttttcgtacaccggtttcaccgcaggccaaatctcttcaccgtgaccgcgcttgtactgctccgcctcttccaggctaatacggcgatttccggcgagagtcagagagatgtgatgtccgccggtggcttcatccgcgctgtacgtcaccttgccctttttcacgatggcaatgccggtagtgccgccgccgatatccactacaccggcgttgtccagttgcagcagatccgcaactgcggttggctcatccagcacatggctcacttccagtccggcagattccagcacgttgatggaaatacgcgggtccgtacctggaggaaaactagtcgccgcatggctaaaacgacgaccgaattgctgctcgagcgtgtcgagatggcgacgaacaatggtgacagcgccgaagaaatcccagacgatgccgtcgcgaaccacatcggcccagtcgaggcataccgccactggctgaccgtcgcggtcgacaaccatgctcaccacatcgcaggtgcccagatccacccccagccacagcggagattccgtcgcggcgggcgtctggttacacagcgttgccgccgtttgcagacgtggggtgagccattgttcgtcgtgcgccatctgttactccttaaacaatgcgaaacgcatcgactaatacacagcgacgcagacggacaaacgtacgcgcgctggttaccccttcaccggttggcgtggtgatggtcatggtggtccagccttccccgcccagccccagcccggcaatgcacggtccgttcttaacgaaaatgctggtatcaatagcattcgccatctggttcatgttttcgatgttgcggctgtgcattgccgccgtgtggtggcaaccgccttccagtttcaccgctagcgcaatggcatccgccacgttggcgacgcgcacgacgggcaacaccggcatcatcagttcagtcacggcaaacggatgttctgcggtggtttccacaaacagcaggcgcgtttcttgcggaactttaaggccgattgccgccgcgattttgcctgcgtcgcgaccaacccagtcacggctgacggtgccttttccgcgctcgtcgatatttttcagcaacaccggttgcagctgctgcgcctgttctgcggtcagtttcaccgcgtgctggccttccatcagacgcatcagttcatcggctacgctatcaacaacaatcagtaccttttcgtcggcacaaatgatgttgttatcgaaagaagcgcctttgacgatggactgagcggcacgggcgaggtcggcggtttcatccaccactaccggcgggttgccagcgcctgcggcaatcagacgtttattggtgtgtttacgcgccgcttctactaccgcttcgccgccggttaccaccagcaggccgatacccggaaacttgaacaagcgttgcgcggtttcgatatccggatttgccacagtaaccagtaagttttccggcccacctgcggcaacaatcgcctggttgagcagcgtaatcgcccgctgggagacttttttcgccgccggatgcggggcaaaaatgacgctgttgcccgcggcaatcaggctgatggcgttgttaattacggttgccgccgggttagtggaaggcgtcacgctagccaccacgccccagggtgcgttttcaattagggtcaggccgttgtcgccagtcagcacttgcggagagaggcactcaacgcctggtgtgccgcgcgcctgagcgacgttttttgcaaatttatcttcaacgcgccccatgccggtttcactgacggcaagttccgctaaatctctggcgtgtttttcgcctgcttcacgaatggcagcaatggctaactggcgcattgccacgctttttaacccttgctgggcgactttggctgccgcaacggcgtcatccagggacgcgaaaacgcccatctcatgaacggcggcggacggcgtgtcactgctttgcattttcagcagtaccgctttcaccacctgttcaatatcctgttgattcatgatgttctgccttatttgtggaaaattacctgaccgccagacaccacctcatcgacaatgccaatcacgcacagatcgaccggactcgtttcgcttttatgcgcctggcgggcggaactgccactcaccagtaacacccactccccggttcccgcgccaatattgtcgatggcgacggcgcattgcccgtcaggattaccttgtggatcaatcatttccaccatcagcaatttgtcatgcgccagtccgtgatggcgtacggtacaaacaatttgtccagtgacgactgccagtttcatacccgcctccgtggcgtatttcaggtaaaagctccccctaccctccgcagaaggtaaaatgaaaaaggagagagcgtgacgcccgaatcgacgtcacacagggtgattacaggttgctgctatcgcctttcaggccgatcgggaagacttcttccaggtcgccgtgcggacgcgggataacgtgtacagataccagctcgccgatacgctgtgccgctgcggcacctgcatcggtcgcggctttacaggctgcaacatcaccacgaaccatggcagtacacaggccgccgccaatctgcttaacaccaaccagcttgacgcgcgcagctttcaccatcgcgtcagaagcctcaatcagtgcaaccaggccccgggtttcgatcattcctaatgcttccattgtgctttcctctttatcagggtccagaacgggaccgttcattcaaccagtgtttgtaaactgctttcgcggttcacttctgtctgacgcggcacagctgccaccagcgccagctcgataatttcctgcacgctacaaccacgagagagatcgtgcatcggcgcggcaagtccttgtatcagtggcccgacggcacgatatccgccgagtcgttgtgcgattttgtaaccaatatttccggcttccaggctcggaaaaaccatcacattggccttgccctgtagcgggctggcaggcgctttttgcgccgccacttccggcacgaaggcggcgtcaaactgtaactcgccatccaccaccagctttggtgcgcgctcacggacgatttctgtcgcctgctggacgttagcaacacaggggtgacgggcgctaccattgctggaaaagctcagcatcgccacgcgcggctcttctccggtgatggcgcgccaggtttcggcactggcaagcgcgatatccgccagctgcgccgccgtcggctgtggcaccacgctgcaatcggcaaagcccaacgccgggccgctgtactgtggcaacatcaggaaaatggaagagagcgttttacagcctggctgcaagccgataatgcgtaatccggcacgcagcacatttgccgtggaagagaggttgcccgcgatacagacatccgctttaccggcgctgaccattgctgcggcgaacatcagagggtcggtaagtttttccagcgcatccggcggcgttttttcgcccgcgcgggccagccagcgatgagcaaattcttcccgcattgcgaggttgccatgcggatcaatcacctgtagcccgtccatcgccacgccgtgactgagcgcaaactgacgaagttcaaacggattggcgaccagaatgggcgttgccagaccttgttgatgtaaatattgcgcggctttcagcacacgttggtctaacgcatccggaaaaaccactctggcgggcgctcgcaacgccagttcacgacaacgttcaataatcattgcgtttcccccagtcgttgttggatctgcttcaccgttagcggctgcttcgttacgctcaggatcatcatcacgtagaccgtgctgctaaggcggttcagcgcctgcaaaatgtccgggcgtaatacttcaaagctgcgggtgataaagacctgcgccgctacggtttcggtttcccgcactttggtgcgtagcagattgagcaacgcagcatcgcgcccgtggctggcttccggcaccagatgatcgtggtcgagatagcgcagcggctgatgagaaagccgatgcagatcttcgtcagaaagcccgacaatcgcctggcagcccagcggttcccccagcgcatcggcgcgcataatgttgccaagacggctacggatatccgccagccacggctgccacggttccgccagttcaatttgcagccacactgccagcgcaatggtgctgtcgagaaccgcgcgaaaacccagacgcggatcgcttttggcgaccattttttccgcgctcaggtgagtcagcgtatccggcttttttgccaccggctggcgacacagttcgcagcacgcctgcggatgttcatcgctactggtcagcccatgaacgggctgcggctgctgctgttcatcgtcaacaaacaggcggccctgctcgtcaataaacttgatgcgcagatggcggctttccagcaactcccgggcagagggcgtcaggcgactgtccgcagggagatggatctctgcgccttcgctgagcgtatggttcgctcttagccatgcttcggtgatgaaatctttcatagggattgccagttagccggccaggcgacatacaggaatttcacgctggatgtcgtaccaaattcgatgctggagcctttcgggataaacatcacgtcgcctgctttggcgatcatggtttggccttcgtggcgaacatgcagctccccttccagcaccatgtcgatttcgtcgtagttcagggtccacgggaagaatgcgttctcccactgcataaaaccggcggccatgctgctgccgtcgtctccggtcacaagatcagtcaagcccacgcaatgcggctctgcgccgtcgaaacgaccaaacttgacgctactgccatcaatcactttgatgccgcctttgccggtcacgcttttgaagctcggctgcattgcgccctgctccaggctctgtttttccttcatcactttttccatcagctgtgcgaccaggctttcggtaaactggccttccggcagctgggcaatgatggtttcgcggatgcgctggctttcggttttgtcggctggcacgctggcgggcacggacgccgttaccgggatgctttcatcacattcggtgatggtaaaacccagtagatccgccacttcacgggcttccggggtaataatgctggcgcgcagaaccacggacattgcctgttcgccgcgcgcgtgtgcttcacgaatatcattcgctgtgatgagttttttcacctgcttcctcctgtttggtgagagatgccagataatccaccagttgctgcacgctttgcgggtcgtggctgtttagctcgaacatcggctcttcgaaacccgtctcaagcaataactttcgcgttgcggcgacgtcagcatctggcatgtccgttttactgatgacggcgatttgccgtttgctgacgccaatatccagcaacccggcaggcaaccgactttccgggtcatttgcgccatggacatagatcagcatgtctacatcctgtagcgtggtaattaaggcgtgataccagcggggatggttaaaatattcacccggcgtatcaatatcgcccttatcattaaattccacggcctgtgtttttctggcgagggtataattcccctgcaacgcattaaataacgttgtttttcctgccccgacgctacccacaaacgcaattcgtttcatgaatgcctcgtattaacttttggtcatttcacaaagcgtataatttaataagcgacctaaaccgctgacggtttgacttaacgcttcttctactgcgcccacgctgccataaatcaccaatgcaccgctgaatcggtcgagaaaaccgatatgcacatcagcggctttcagcgctaaatcaccggcgatcatcgccgtttcgccgggagttagcgtcataatgccaattgcgcccgcatccggaacgccgattttcttcgccagttcctcaccgggatgcgcgatgagatgcgccagtgtgacctgtttgccgggcacaaattcctgaatgatgcgttctttatccatgagtcgccgcctgtgaaaaactttcgtgtatcgtgacaatttttcgtcagagtaaataacaaaattcggcaagcgcgtttaaaaggtgaggtagatcactaagaatggagagatattcgctgtggtgcataaactttcatatgcaacgcatgaatataaataaaataatatcgagatattatatagactgcttttttttattattcgcaaactcagtaataagctttactaatatattgcagctaaactgcttaccctgaatattcagggtaagcgtgagagttaaaaaaaattacagcggttgggtttgcgcttctaccacggccagcgccaccatgttgacgatacgacgcacgcttgcgatcggcgttaacacgtgaaccggtttcgccacacccatcagcaccgggccgacagtcacaccttcgctgctggaaacacgcagtaagttgtaactaatgcgggcagcttccatgttcggcatcaccagaatattggcggaacctttcaaagagctgtccggcatacggtcgttgcgaatcgcttccaccagcgctgcatcgccgtgcatttcaccatcaatcatcagttctggtgcacgttccctgaccagttccagcgcctgacgcattttgctgctgctcgggcagtcagaagaaccaaagttggagtggctcaacaaagcaacgcgcggctcaataccaaaacgacggacagtttctgccgccatcaaggtgatctccgccagctcttctgcatccggttcatcattaacatatgtatcggcaataaaggtgttaccactcggcagcagcagcgcgttcatggcacctgcggtgtgaacgccatcgcgataaccaaagacatttttcaccacgctaaaatgttcatgataatcacccaccgtaccgcaaatcattgcatcggcttccccacgctgaaccatgatcgcgccgatcactgtcgggttactgatcagcgcccgctgcgcctgttcctgagtgacgccgcgacgcttcatgatctggaagtattcggtccagtactctttaaagcgcggatcggattcgttattgacgatctcaaaatcaacgcccgctttgatctgcaagcccagtttctgaatgcgcatttcgatcacgttcggacgaccgataaggatcggtttcgccagtcccagcgttaccagttcctgagtggcatgcagaacgcgcgcctcttccccttccggcagaacaacgcgcttcggcgctttgcgagcctgggagaaaatcggcttcataaacaggttggttttgtaaacgaactcagtcagcttgtcgatgtagacgtcgaaatcagcaatcggacgagtcgccacgccgctctccatcgcggctttagcgaccgcaggagcgatcttaacgatcaagcgcggatcaaacggctttggaatgatgtattccggaccaaagctcagatcctgatcgccatacgcactagccaccacttcgctctgttccgcatgggcgagttctgcaatcgcacgtaccgccgccagtttcatctcttcgttgatggcggttgcgccaacgtccagcgcgccacggaagatgaacgggaagcacaggacgttgttcacctggttcggatagtcagaacgaccggtgcaaatgatggcatccggacgcacttctttcgccagcggcggcagaatttccggttccgggttcgccagcgccaggatcattggcgcacgagccattttcttcaccatttcctgggtcagcactttcgggccggaacagcccaggaaaatatccgcgccttcaatcacatcatcgagggtacgtttgccgtcatccaccaccgcatatgcggctttggtttccgccatgtttggctcacggccctgatagataacgcctttactatcgcaaaccacgatgttatgtttttgcagacccagcgctaccagcaggttcatacaggcgattgctgcggcacccgcgccggaaaccaccatccgcacgtcggagatgtttttctccaccacgcgcaagccgttgaggatggcggcagtgctgataattgccgtgccgtgctgatcgtcgtggaataccggaatattcatccgctcgcgcagtttctgttcaatatagaaacattctggcgctttaatgtcttcgaggttgatgccgccgaaggttggttcgagcgcggcgacaacttcaataaatttgtccgggtcgagttcgtcaacttcaatgtcaaatacatcaatcccggcgaatttcttaaacagaacgcccttgccttccatcaccggtttgcctgccagcgcgccaatgttgcctaaccccagcaccgccgtaccgttagagatcaccgccaccaggttacctcgggcggtatatttgtaggcttttaacgggtctttttcgatttcaagacaaggtgcggcaacgcctggactgtaggccagcgccagatcgcgctgtgttgccagaggcttggttggagaaacctggattttccctggaactggaaattcatggaaatcaagtgcactttgttttaactggtcatccatttggttgttcctttcacgtaacgttcacaaataaagtgtgtgggcaacagcccctgcccacaacgtggcgcacattattaccctgccggagtctacagactttgagcaagtccaaactctcaccattaatataatgttttggtaataatcctataacactgatgttacctgcttaatccagcaataccatgcctgtctgctatgcttttttgatgcgtttagcgaaatttctcagaagtgtgaattaacgcactcatctaacactttacttttcaaggagtatttcctatgaacgagttagacggcatcaaacagttcaccactgtcgtggcagacagcggcgatattgagtccattcgccattatcatccccaggatgccaccaccaatcctagcctgttactcaaagctgccggattaagtcaatatgagcatttaatagacgatgctatcgcctggggtaaaaaaaatggcaagacccaggaacaacaggtggtcgcagcgtgtgacaaactggcggtcaatttcggtgctgaaatcctcaaaatcgtacccggtcgcgtgagtacagaagttgatgcacgcctctcttttgataaagaaaagagtattgagaaggcgcgccatctggtggacttgtatcagcaacaaggcgttgagaaaagtcgcattctgatcaagctggctagcacctgggaaggaattcgcgcggcagaagagctggaaaaagaaggtattaactgcaacctgacgctgctgttttcttttgcacaggcacgggcctgtgcggaagcaggcgtttttctgattagcccgtttgtcgggcgtatttatgactggtatcaggcacgcaagccgatggacccgtatgtggtggaagaagatccgggcgttaaaagcgtgcgcaatatctacgactactataagcaacaccactatgaaaccattgtgatgggcgcgagcttccgtcgcaccgaacaaatcctcgccttaaccggctgcgatcgactgactatcgcaccgaatttactgaaggagctgcaggaaaaagttagcccagtggtacgtaaattaatcccaccttctcagacgttcccacgcccagctcccatgagcgaagcggagttccgttgggagcacaatcaggatgcgatggcggtagaaaaactgtctgaaggcattcgtctgttcgccgttgatcaacgcaaactggaagatcttcttgccgccaaactataaaccagccacggagtgttatatgtcccgaaaagaccttgccaatgcgattcgcgcactcagtatggatgcggtacaaaaagccaactctggtcatcccggcgcgccgatgggcatggctgatattgccgaagtgctgtggaacgattttcttaaacataaccctaccgacccaacctggtatgatcgcgaccgctttattctttccaacggtcacgcgagcatgctgctctacagtttgctacatctgaccggttacgacctgccgctggaagaactgaagaacttccgtcagttgcatagcaaaaccccaggccacccggagattggctatacgccaggcgttgaaaccaccaccggcccgcttggacaaggtttggcgaacgccgtcgggctggcgatagcagagcgtacactggcggcgcagtttaaccagccagaccatgagatcgtcgatcacttcacctatgtgtttatgggcgacggctgcctgatggaaggtatttcccacgaagtctgtagcctggcaggcacgctgggactgggcaagctgattggtttttacgatcacaacggtatttccatcgacggtgaaacagaaggctggtttaccgacgatacggcaaaacgttttgaagcctatcactggcatgtgatccatgaaatcgacggtcacgatccgcaggcggtgaaggaagcgatccttgaagcgcaaagcgtgaaagataagccgagcctgattatctgccgtacggtgattggctttggtagcccgaataaagcaggtaaggaagaggcgcacggcgcaccactgggggaagaagaagtggcgctggcacggcaaaaactgggctggcaccatccgccatttgagatccctaaagagatttatcacgcctgggatgcccgtgaaaaaggcgaaaaagcgcagcagagctggaatgagaagtttgccgcctataaaaaggctcatccgcaactggcagaagagtttacccgacggatgagcggtggtttaccgaaggactgggagaaaacgactcagaaatatatcaatgagttacaggcaaatccggcgaaaatcgctacccgtaaggctagccaaaatacgcttaacgcttacgggccgatgctgcctgagttgctcggcggtagcgcggatctggctcccagcaacctgaccatctggaaaggttctgttagcctgaaggaagatccagcgggcaactacattcactacggggtgcgtgaatttggcatgaccgctatcgccaacggcatcgcgcaccacggcggctttgtgccgtataccgcgacgttcctgatgtttgttgaatacgcccgtaacgccgcgcggatggcggcactgatgaaagcgcggcagattatggtttatacccacgacagtattggcctgggcgaagatggtccgacgcaccaggctgttgagcaactggccagcctgcgcttaacgccaaatttcagcacctggcgaccgtgcgatcaggtggaagcggcggtgggctggaagctggcggttgagcgccacaacggaccgacggcactgatcctcagtaggcagaatctggcccaggtggaacgtacgccggatcaggttaaagagattgctcgtggcggttatgtgctgaaagacagcggcggtaagccagatattattctgattgccaccggtagtgagatggaaattaccctgcaagcggcagagaaattagcaggagaaggtcgcaatgtacgcgtagtttccctgcccagcaccgatattttcgacgcccaggatgaggaatatcgggagagcgtgttgccttctaacgttgcggctcgcgtggcggtggaagcaggtattgccgattactggtacaagtatgttggtctgaaaggggcaattgtcgggatgacgggttacggggaatctgctccggcggataagctgttcccgttctttggctttaccgccgagaatattgtggcaaaagcgcataaggtgctgggagtgaaaggtgcctgatggtgattgccggatgctgattgccggatgcgacgctgacgcgtcttatccggcctacagcgtcttatccggcctacatgtcccgccattttgtttaacgggtgatccacaacgtgggccaggcgtctggcccatgccagttatcgcaggtgggttctgcggcgtaacgcaccaggcgaaaacgctgaccgtcaaagcgccagcgcgcctgaatgccacaatcgcttaatccgcgccctttcgctaaggtcaccagttcacggcttttctcatcaaatgttgcgttcatcagttccagttcattcgtctcctgaccgttgttgaacggcaaacgcaaccgaaccgggcggctagctagtggctttttacggctcacaatccatgccaaatcaatggtgttataggcccctgcctcacagctaatcatcatcagcgctttatcatcagtcagcgcagtgacattcacctcacgacgcaatggatcaaggctgcagcgcagaccattcatccgccagtttccataatccagcaaatcgttgcgttcttcgagactgagtggcgtcggcgttgggttaaccaccgcgacctctttcagcgcaggcgcgggcggtacgctgagcggcggttcgtcccctttcttgatccacgcggtttcactgccaacgcgcttttgctgagcatcaataaacaacaacgctgcttttaagccactcagagaaatggtctgatcgccatcgcgtaaggtgattgccttcccttcctgaatcatctgcaaaaacgcggtgatggttgccgtatcatcggttactaataaccatggactaatccgccacttgtcaccacttaacgccaacggctcgccatctaacagcagccgtggcgctatctccccttcactcgcctccgggctcttcaatccgccgcgctcaatacgtaaaacggcatcggtatgcgccccggcgctgcggctcagggtcatcaccagtccattatgatcgcccgtattacgcgccacgcagaaattttggttattacaggtgacctgccagtcggaaaacgcccgttgcgctggtgccgcccacaccaaagacgtcggcaacaaagcgaaaaaaaagagaaggaaaatgcgatagcgcatggacggtacgaccccagaagttcaaacaaacagcacaagtcgtatcttcgttgcgcaggtagcgcggctcaatcggatttgtcggattgagccaataataaacaacgaaatattattgttatttttcagtccattaaatgactcgtttgcaaatagttaagcaataacaccgtcttaccgtcacgtatctcgccggttttgatcatctccagcgcctggctgaacggcagctcgagcacttcaatatcttcatcttcgacaccgccaccggcgttagcgcgctgattgtcactgtattcggcgataaaaaagtggattagctcagtcacaccgcctgggctcatatacagttcaaataatttgcgcacttcacccacttcatagcccgtctcttcaatcgcttctttgcgaatacacacttccggttcgtcgttatccagcagcccggcgcagctttcaatcagctgcccgctttcattgccattaacccaggtagcgacacggaactgacgaatcagaaccacggtctttttcttcgtgttgtacaggaggatcgtcgcaccattgccgcgatcgtacacttcacgtttatggcggataacttcgccgtctttgcgcgtgagatcgtaagtaatgttgtgcagggtgaaatagttatcggagagaattttgtctttaatgagggtgatttgttgcgtcataccgactccacagcgcgaaatgaacaattatcttacgctgtgaagtcgggtttgtctgcgcaggctatcagtgagatttgacactttttacccccagccagtcaataatcccctgtgccgcatgacgtccttctgccattgcggtaaccaccagatccgcaccacgcacggcgtcaccaccagcgaagattttcggattggtggtctggtaacggtactggctttccacatccgcgatgatgcggccccatttgtctaccgttacaccgtggctctccagccacggcatcccgtgcggattgaagccaaacgccataatcaccgcgtcggctggcatgacaaattcactgccttccaccggcactggacgccgacgcccctgggcatccggctctccaagacgcgtgcgcaggaaacgaatcccgcagacgtgaccttgttcattcagctcaagcgccaccggctggacgttaaattcgaagttggccccctcttcgcgggcgttcttcacttctttcttgctgcctggcatgttagcttcatcacgacgataagcgcaggtgacgttactcgcgccgtggcgcagtgcggtacgcacacagtccatcgcggtgtcgccgccgcccagtaccacgacgttaagtccggcggtattgataaacggctcttccggtagctcttcgagccccatcacctgtttagtgttggcaatgaggaacggcagcgcgtcataaacgcccggcgcatcttcattgggtaaacccgctttcatggaacggtaagtgcctacgccaacgaagaccgcgtcgtattgttccaaaaggctatccaaagagacatctttacccacttcacaattgagttcgaagtgaatccccatcgcgctgaagatttcccgacggcgtgccagcagggatttatccagtttgaaagaaggaatgccgaaagtgagcaagccaccgatttctggatggcgatcgtacaccgtcacccccacgccattgcgggtcagaacatccgcacaggccagccctgccggacctgcaccgataatcgccacccgcttgtccactttggtgacatggcttaagtcaggacgccaacctttcgccaacgcctgatcactaatgtagcgttcaatgttgccgatagttaccgcgccgtgctcatcgcgaatagtacaggcaccttcacacaaacggtcttgcggacaaacgcgtccggtaatttccggcagggtgttggtctggtgagaaagctcgacggcggcgtcgatgtttccggctttcaccagttcaatccactgcggtatatggttatgcagcgggcaggtccattcacaaacgctgtgctcgccgcacttaaggcagcggctggcttcccgttgtgcctggtcggcgcgaaatggcagataaatttcatcaaaaccggttttgcgcgcttcaatcgccagtttatccggctcgccacgcgcgggcgttgcctgcatttgttcgactttactcattaccggcatttcttgcgccgcggtactggcatgccacggttgatgttcctgacgcgcggtgcgcaagcggcgggatttcgccatgccggagagtgcgacgtcagtgaccagttgcagcgcgtccgccgggcaattctcaacacaggcaggaccgttttcgcgccccgcacaaaggtcgcatttatgcgccgtggcttttacttttcctgccgcgacgggtgtcaggacgatttgcatcgtaccaaaaggacaggccaccacgcaggatttacagccaatacacttttgctgattgacctgaatgctgtcatcaacgtggctgattgcgccattagggcagctacgggcgcagggcgcatcttcacaatggtgacaggtcactgcactacgttgctgttgatgtttgataaccgtaattcggggatgaaaatggtgttggctcaggacatgttgctcatcattgtgagccatgacacaggcgatttcacaagcatgacaacccagacattgctgactgttggccataataaaacgattcataacgaccttcttttttggttgtaaaaaccttattctttatatgagtgttgttattacccgacttacaggggaatcggcaatgttcatgtgcccagaataagtaactatttcgctataaactgtggcagatcaaataatcccatcactgactaaattgcgtttcagcgaactggaacattaatgattttttgtggagaagacgcgtgtgattgttaaacgacccgtcagcgccagtctggcccgggcctttttttacattgtgctgctgagcattctttccacgggtatcgctctgctaactctggcgagcagtttgcgcgacgctgaggctatcaatattgccggaagcctgcgtatgcagagttaccgcctgggctacgacttgcaaagtggcagtccacaactcaatgcacatcgccagttatttcagcaggcactgcatagtccggtattaaccaacctcaacgtctggtatgtgccagaagcagtaaaaactcgctatgcgcatctgaatgccaactggctggagatgaataatcggctcagcaagggcgatttgccgtggtatcaggccaatattaataattatgttaatcagatagacctgttcgtactggctttacagcactacgctgaacgcaaaatgctgctggtggtggcgatttccctggctggcggcatcggtattttcacgctggtcttttttactttgcgccgcatacgccatcaggtggttgccccgctgaatcagctggttaccgccagtcagcgtattgaacacgggcagttcgacagcccgccgctggataccaacctgccgaatgagcttggtctgcttgcaaaaacctttaaccagatgagcagcgagctgcataaattgtaccgtagcctggaagcgagtgtagaagaaaagacccgcgatctccacgaggccaagcgtcgtctggaggtgttgtatcagtgtagccaggcgctgaacactagccagattgatgtgcattgtttccgccatattttgcagattgttcgcgacaatgaagcggctgaatatctggagttaaatgtcggtgaaaactggcggattagcgaagggcaaccaaacccggaattgccgatgcagattttaccggtgacaatgcaagagacggtttacggcgaactgcactggcaaaatagtcacgttagtagtagtgaaccgctgcttaacagcgttagcagcatgctgggacgcggtttgtactttaatcaggcgcagaagcattttcagcaattattgttgatggaagaacgtgcgaccatcgcccgcgaattgcacgacagcctggctcaggtactttcttacttacgtatccagttgacgttactgaagcgtagcataccggaagataacgccaccgcacaaagtatcatggccgatttttcccaggcgttgaatgatgcttatcggcagttacgcgagctgttgactactttccgcctgacgctgcagcaggcggatctcccctccgcattgagggaaatgctggatacgttacaaaatcaaaccagcgccaaactgaccctcgactgccgtctgccaaccctggcactggatgcgcaaatgcaggtgcatttgttgcaaattattcgcgaagcggtgctgaatgcgatgaagcacgccaacgccagcgaaatcgccgtcagttgcgtcaccgcgccggacggcaatcacacggtttatatccgtgataacgggattggtatcggtgaaccgaaagaacccgaaggtcattatggtctgaatatcatgcgcgaacgcgcggaacggctaggtgggacgctgacttttagtcaaccttccggcggcggcacgttagtgagtattagctttcgctctgcggagggtgaggaaagtcagttaatgtaatgcctcctactgaccaaagaatacttgcacttaaggttcagtataaaagggcatgataatttacattaactcctttttttctccacgattggctcgtaccttgccgctacagtgaagcaagtcaagcctacaacgatacgcagaaacacgaggtcctcttttaatggcgaatttctttattgatcgccccatttttgcctgggtgctggcaatcctgttgtgtctgacaggtaccctggcgatttttagtttgcccgttgaacaataccccgatctcgcgccaccgaatgtgcgagtgaccgctaactatcccggcgcaagcgcccagacgctggaaaacaccgtgacccaggttatcgagcaaaatatgaccggcctcgataatctcatgtatatgagttctcagagcagtggcaccggtcaggcatctgtcactttaagttttaaagcaggcaccgatccggacgaagccgtgcagcaagtacaaaaccagctgcaaagtgccatgcgaaagttaccgcaggcggtgcaaaatcagggcgtgacggtgcgtaaaaccggcgataccaacattctgaccattgccttcgtctctaccgatggtagcatggataaacaggatattgctgattatgttgccagtaatattcaggacccgttaagccgcgtgaatggcgtcggggatatcgatgcctatggtagccaatattccatgcgtatctggctggacccggcgaaactcaacagtttccagatgacggctaaagatgtcactgatgccattgagagtcagaacgcgcagattgcggttgggcaacttggtggtacaccttccgtcgataagcaggcgctcaacgccaccattaacgcccagagtctgctgcaaacaccagaacagttccgcgatatcaccttgcgggtcaatcaggacggcagtgaggtaaggctgggcgatgtcgccaccgtcgaaatgggggcggagaaatacgattatcttagccgcttcaatggtaagccagcctccgggctgggggtaaaactggcctccggcgctaacgaaatggcgacagcggagctggtgctcaatcgtctcgacgagctggcgcagtatttcccgcatggactggaatacaaggtggcgtatgaaaccaccagctttgttaaagcctccattgaagacgtggtgaaaacgctgctggaagctatcgctctggttttcctcgttatgtatctgttcctgcaaaacttccgcgccacgctgatacccactatcgccgtgccggtggtgttgatgggaaccttctccgtactttacgccttcggttacagcgtcaacaccttaaccatgttcgcgatggtgctggcgatcggtctgctggtggatgacgccatcgtggtggtggaaaacgtcgaacgtattatgagtgaggaaggactcactcctcgcgaagccacacgtaaaagcatggggcagatccagggggcactggtcgggattgcgatggttcttagcgcggtatttgtaccaatggccttcttcggcggcaccaccggtgccatctatcgccagttctctattaccattgttgcggcgatggtgctgagtgtactggtagcgatgatcctcactccggctctgtgtgccacactacttaagccactgaaaaaaggtgagcatcatgggcaaaaaggcttttttgcctggtttaaccagatgtttaaccgcaacgccgaacgctacgaaaaaggggtggcgaaaattctccaccgtagcctgcgctggattgtgatttatgtcctgctgcttggcggcatggtgttcctgttcctgcgtttgccgacgagcttcttaccgctggaagaccgtggcatgtttactaccagcgtacagttgcccagcggtagtacgcaacaacagaccctgaaagtcgttgagcaaatcgagaaatactacttcacccatgaaaaagacaacatcatgagcgtgtttgccaccgttggttctggccctgggggtaacgggcaaaacgtggcgcgaatgtttatccgcctgaaagactggagcgaacgcgacagtaagaccggcaccagctttgccattatcgagcgtgcaacgaaggcgtttaaccaaattaaagaagctcgcgttatcgccagcagcccgccagcaattagcggtcttggtagttctgcaggttttgatatggagttgcaggaccacgctggagcgggtcacgatgcgctgatggcagcacgtaatcagttgctggcgctggcggcggaaaacccggagctaacccgtgtgcgccataacggcctcgacgacagtccgcagttgcagattgatatcgaccagcgtaaagctcaggcgctgggcgttgctatcgacgatattaacgacacactgcaaaccgcctggggtagcagctatgtgaatgactttatggatcgcggtcgcgtgaagaaagtctatgtgcaggcagctgcgccgtatcgcatgctgccagatgacatcaatctctggtatgtccgaaataaagatggcggcatggtgcccttctctgctttcgcgaccagtcgctgggaaacaggcagcccgcgtctggaacgctataacggttattctgcggttgagattgttggggaagccgcaccgggggtcagtaccggtacggcgatggatattatggaaagcttagtgaagcagctgccaaacggctttggtctggagtggacggcgatgagctatcaggagcggctttccggcgcgcaggctccggcgctgtacgccatttccttgctggtggtattcctgtgtctggctgcgttgtatgaaagctggagcgtgccgttcagcgtaatgctggtcgtgccgctgggggtaatcggcgcgctgctggcaacctggatgcgcgggctggaaaacgacgtttacttccaggtgggcctgttaacggtcattggtttaagcgcgaaaaacgccatcctgatcgtcgagtttgctaacgagatgaaccaaaaaggccacgacctgtttgaagcgacgctccacgcctgccgtcagcgtttacgcccgattctgatgaccagcctggcatttatcttcggcgtattgccaatggcaaccagcacgggtgccggttccggtggtcagcatgcggtgggtactggcgtaatgggcgggatgattagcgccactattctggctatttacttcgtgccgctgttctttgtgctggtgcgccgccgcttcccgctgaagccgcgcccggaataagcaataaaaaaggcgacatgccaatgtgtcgcctttttcaactttccgattaagaacctgctcagcgggttcttgctgtttgtactttgtctcaggaattacttacgaagcataacttcgataaagtctttccagttccccagttcacgttcaatcataacaacctctcttataattatgggtattctacggaaacaatataccgtggtgaagctaatttactcgattgctgcgatgactacctccgggggacaaatcttatgtaaatactatggtcctgcggtgatgatttgtatgtgatacacagcaacatttcgagatattcatacggcatctaatactgatttaattctggttaaaatacagacagataacaagatgaatattcttaatgtttacgttaaaaatgtttaatattatttaatagttgttaatttgaatacttcgataatgttatatttcctgataatcatttgcaggcaaaatgttttcacccttaaatgagtatttattctcataaatcgaaaaaggattcattatggttacactttacggtatcaaaaattgtgacaccattaaaaaggctcgccgttggctggaagccaataacatcgactatcgttttcatgattaccgcgtcgatgggctggacagcgaattattgaacgattttatcaacgaattaggctgggaagcgttactcaacacccgtggtacaacctggcgtaaactggacgaaaccacccgcaataaaatcaccgatgcggcctctgcggcggcattaatgactgaaatgcctgcaattatcaaacgtccattgctctgcgtgcccggtaagcctatgctgctgggtttcagtgattccagttatcagcaatttttccatgaggtgtaatctatgagctgcccggttattgagctgacacaacagcttattcgccgcccttccctgagtcctgatgatgcaggatgccaggctttgttgattgaacgtttgcaggcgatcggttttaccgttgaacgcatggactttgccgatacgcagaatttttgggcatggcgtgggcagggtgaaacgttagcctttgccgggcataccgacgtggtgccgcctggcgacgccgatcgttggatcaatcccccgtttgaacccaccattcgtgacggcatgttattcgggcgcggtgcggcagatatgaaaggcagcctggcggcgatggtggtggcggcagaacgttttgtcgcacaacatcccaaccatacggggcgactggcatttctgatcacctctgatgaagaagccagtgcccacaacggtacggtaaaagtcgtcgaagcgttaatggcacgtaatgagcgtctcgattactgcctggttggcgaaccgagcagtatcgaagtggtaggtgatgtggtgaaaaatggtcgtcgcggaagtttaacctgcaaccttaccattcatggcgttcaggggcatgttgcctacccacatctggctgacaatccggtacatcgcgcagcacctttccttaatgaattagtggctattgagtgggatcagggcaatgaattcttcccggcgaccagtatgcagattgccaatattcaggcgggaacgggcagtaacaacgttattccgggtgaactgtttgtgcagtttaacttccgcttcagcaccgaactgactgatgagatgatcaaagcgcaggtgcttgccctgcttgaaaaacatcaactgcgctatacggtggattggtggctttccgggcagccatttttgaccgcgcgcggtaaactggtggatgcggtcgttaacgcggttgagcactataatgaaattaaaccgcagctactgaccacaggcggaacgtccgacgggcgctttattgcccgcatgggggcgcaggtggtggaactcgggccggtcaatgccactattcataaaattaatgaatgtgtgaacgctgccgacctgcagctacttgcccgtatgtatcaacgtatcatggaacagctcgtcgcctgatgagtggttctgcaagaggaaataagcatggactggctggctaaatattggtggattctggtgattgtctttttggtaggcgtcctgctgaacgtgattaaagatctcaagcgcgtcgaccataagaaatttctcgccaacaagccggagcttcccccgcatcgtgatttcaacgataagtgggacgatgacgacgactggccgaaaaaggatcaaccgaagaagtaagctgagtgctcaaccgtaggccggataaggcgttaacgccgcatccggcaatggtgaacgatgcctgatgcgacgctcacgcgtcttatcaggccaggtaatctgtcttttacatcatttcaatcacatcatcatcgccaggcttaccgccacttagcgcttcgtcgaaataatgtttcggaatggtataacgcaagtgatccagggcaaattgcatactgcgattgtcgatcgcatggcctaaatcctccacgatatccagcgtcacgtcaccaccggcactgattaacgcttcctgcgccgcaaccgcatgcgccagatcgataaccggatcttcaccgccatgaatcaggtgaattgtcgtggctgtagacgcagtttccggcaggctcgcatagcgtccgttaaaagcaatgacgcgactagcaaggcccggttcggctttaatgctctccagcaccataatcgcgccttgagagaaaccgatgagcgccgtggcgttagcccctactccgctctgtttctgccagtagcgcaccgtttcaataaacgtcggcatgatcgcatccacacgcgcctggcgattatcttccgtaataccctgcacgctaaaccactgacgccccgccggattaccgctcggctccgcgccaccgacactcaccaccagcgcatcaggaaacagcggtgcaaaccagttgcctatttcccccattgccaccgggttatccccgacaccgtggaaaagcagtaacaactgttgcgcaggtttatccgggctttgaacaacaaaatggtcatgtttcatggcgaactccttaactgatgtcattaattttacgccgctgactcacaatgaccatgagataaaattgaaggagtcagtgaaataattgccattgcgttatgcgatcgcgcagacgctcagtgcgaacatcattaagtgcgaacagcgcctgcgcggcctcttcccgctgacggaccagtaacatcttgcggccactaagtttaagtgtggtacataactgcgcatcactggcgtttttctgtaaacgcccacgcagcgccggtaatgccagttcactggtttgtaacagacgcaataagcaacctaagctcgttaatagcggacgatgagcgaaagcaaaaccggccagttcaagccagtcgtcgtcagaaaggacggcatcgtttagtggatcaacaggaagcgtttcgccattccactgcgcgagagcttgcgcatcgcgacgtaaacggtaatgctcacgttcagccagctgtttacccgcatcactcatcggtaacagcgccatcgccgtatagcaaccgctgctggcttcccgatgattacccatccgcaccagcacaaaaccgcagcgttgccagaaacgccataactccccggtgtaaccaaaactcacgctaagatagtcgaggtcttgcgtatattgcaaagcaccagcaataagttgccgccctgtgccttcccgctgacgagccggatgaactgctatccggctgacccgccgtccacgcaatgtcgccgccagtggattgttgccgtgcgccgccaggctctgggccaccagattaccccgcgggcgacgaaaacctgcccataccgcctgactgagttgttgagataatccaccctcatccaccagccacagcgccccggcaatctcgttttcgccagccgcctgtaaaaaatgttgccctggtgcatccatcatccggcgtaaatccagcgggctagtccgatagtgcgcaccagacaagagctgataaacctttaacggcgtttctggatcgctttgccataacgtctgttcaaatgcggaaatgacaatattgccttgtggtgtatgggtgaagttttcatcgtcaaaaaccagtgcctcgctgaccattttttccagcgggcatccctgcgcccagcggatcggctgttgcagttcaaaacggtgtaaatgcggaaagcgagcgcaaaatttcagcaaaaaaccacgtccggtgccttcgtagccctgcaccgtagtggttaacaacgttcgaggaaaacggcttaccagttgatgcaacaatggcgcaggtatggctgcggcttcatcgaccaccagccagtcggcttgctcatcgctggctaacaaggcatccggcgcaataaagcgaaacttctcgcccgcaaattgtgccagtacatccgtactcgcttttgcgggcgcggtgacaatcgctctgcccgcaatacgagaaatgagttgccctgccaacgcgctcttaccgcgcccacgcgcagccgttaccgctgccacgcccggcggcatggtcattagctgctttaagagttgctgttgttctggttgtggtgcgccagtcgcggggtaccagtcagtacggggagtaaaatgcgccaagctgaatggctggttttgccgccagaggatagcctcgttatccgccgtaagtacgcgtttgagatgctggacaaaatgcggcgtcgcaatagggtcagggcaatcactccagcgcaggctgtcggcatcaggttggttttcccactcttcccatacagggagtaacaaaaccagccagcttcccgctttcaacgttccgctaagtgcggcaaaggcagcggcatcaaagccgtggcgggcgtcgaataccgcatgccggaactcgcgcccaagtaaagtttgtagtgcgctgggagaacagtggttttcagcatctggccgcgggctaatccacagccagtcgccaggtaaggcatcacgcaacttaagagtatgctcaaaacaccaaccctcttccccgctcaacaccagcaagcggcggatcccttcacgtttcatttgcgctgttaatgtgtgaagcgcagtcagttcagccatccctgccccggaagttaaatgcttttaccaaaagtattgcattgtgccggatcgccgctgtcgaaaccacgtttaaaccagctgtagcgttgctgagaagtgccatgagtgaaactgtctggtactactcgcccctgactttgctgttgtaaacggtcatcgccgatggcctgcgccgcgttcagcgcctcttccagatcgccggtttccagaacgccttgctgctgcatactatgcccccagacaccggcaaaacagtcggcctggagttccatacgcacagataagcggtttacttccgcctgcgtcgcgttttgttgcagttgacgaactttcggctcgatgcctaacagtttctgcacatgatgaccgacttcatgggcgataacgtacccctgggcaaaatcgccatccgcgccaagtttgtctttcatgtcatcatagaaggagagatcgatataaaccgtgccatccgccgggcaatagaacggccccattatggactggcccgccccgcagccggtacgcgtcattccacggtacatgaccagcttcggttgctgataggtcttacccatcttctcgaactgttgtccccaggtgtcttccgtggttgccagaatcacgctggtgaattttgcggcttcgtcttcatttgggctaatactccgcgtactttgttgttgggaaaccggctgcccggtcatcaacccggttaaatcaacaccatagtagcctgcaaccagcacgactatcagtaaaatcagcccgcctttaccgcttggcaggcgaaaaccgggaccgcccatagatggaccaccagagctgttgcgcctgtcttcaacattgtcactttcacgtcgcccttgccaacgcatagatacctcaacaatatattcattatagaaatgatcgtaggtggttcagaggaagattaccacaggaaagcgggatgaaatggcggaggaatgagcgttcaatgcatatattccgagagcggttgtcttgccgtgccagctgcacggcaagatgatgaacagaaaaatcagtccagctgtacacccaggcggcgggcgacggcttcataggcttcgatcaggccaccgaggctctggcggaaacggtctttgtccattttctccagcgtttctttgtcccacaggcggctaccgtccggggagaactcatcacccagtaccacttcgcctttgtacagaccaaattccagcttgaagtcgaccagaatcagaccagcatcatcgaacagttttttcagcacgtcgttcgctttgtaggtcagctctttcatacgcgccaggttctctttgctcacccagccaaaggtttcgcagtaagattcgttgaccatcggatcgtgcatggcgtcgtttttcaggaacagatcgaacagcggcgggttcagctcaataccttcttcgattccaagacgtttcaccagagagccagcagcacggttacgcacgacacactcaaccggcaccatatccagctttttcaccagacattcggtatcggagagcagacgctccatttgagtcgggatacccgcttcagccagtttgctcataatgaagtagttgaacttgttgttcaccatacctttgcgatcaaactgctcaatgcgcgcgccatcccctgcactcgtatcattgcggaattcgagcaccaacaggtccgggttttccgtgctgtatacggttttcgctttaccacgatacaactcagcttgcttttgcatctttatcactcctgggtgtgaattaacgttttaaaatcttttgctgtctggtgtgccggatgttttgtcggatgcggcgtgaacgccttatccgaactacgtccgacaaacaaatttcgtgcgaattaccgctaaaatcgcgttttcctgcagacgcacacgtttgcgtatcatatcagaaaaaagggccggatgattccagccctgtatttttacttgctaaacgcagcctggaagacagctaccagcgcgtcgttctgactctgagtcagagtatgacctttcggatcgatgaactgtaggctgctgcggttatctaaatcgccaacctgcagtttatagtcaccggatgccaggcctggatcgctcgcgcccagttcctgccagtcgctgtcagacagcggcttataagttacggccatgttgccctggctacgggtgctgtcggtcactttcatgcccactttttccagcgccgctggcagacgttgccaaaccacattgaacggcccgcgtacgaccagcattggtaaaccggtgtcatcagctgcactttgtacgtccatagtggtggaggcacgattttgcgcagcgttcgcggcgtcagtggcagatttatccagaccggcggaaataacgttcatcatctccgtgctgtaacgctgcatggaagccgcgtctgcaaccggtttgcccgcctgttccaggttcagcagtttaaccgtaaccgcctgctgataaccctgcggcttaacagagatttgataacgaccacgatactgctcgtcttcgtccagacggttccattgtacccaatcggtggtcagtgtctgaccagcatcatcacgttgggtgatggtgtagtttttcgcctgcagcacgctaaccacctgcggccacagagtattgccacgaccattttccaccagcaaactagcggtatcgcccgtgaactgggtacgcgcgccagaaaccagtgccagcggctgggctggtggacgaatgtccagcgccttaccgacagcaccactaccgttggtcaccgggattgcataatcaccggaggtcaccggcaaaatcattccagccggggcatgaagctccgcaagcggtgccgcttccaggtaggcttcatcaccactgacctgacgcttatagcgactgtcagaactacaggcagcgagtaataaaacaaggctaacacccgcaacctttgccaggcggctcttttgaacagagtaagccatcaaatctccctaaactttacagcaaaccggcatgcttaagcgccgctctgaccgtctcacgaccactgtcggtgattggtgtcattggcaggcgcagcgtatcggtcgccacaagacccagttccttacatgcccatttcaccgggattggattgggttcgacaaatagtttgttgtgtaatggcatcagacgctgattaataacgcgtgcctcggcaaaatgcccttctgctgccagtttgcacatctgggccatatcacgcgctgcgacgttagccgtaacggaaataaccccatgaccgcccaattgcatgaagtccagcgcgctcgcatcatcgccgctcagcagaacaaaatcatcactaaccagctctttgatctggtttacacgcgttaagttccctgttgcctctttgattccgataatattttttactttcgccagacggcccaccgtttccgggagcagatcgcagccagtacgggacggcacattatacagaatttgcggcaggtcagtatgctcagcgatggctttgaaatgctgatacaaaccttcttggctcggacgattgtagtaaggggttaccgtcaggcagccgacgataccactgtcattgaagcgctgcgtcaggctaatggcttccgcagtagcgttagcgccggtcccggcaattaccggaatgcgcccatcagccagatccagcgtcatcatcaccacatcagcatgttcgtcatgatttaaggtagcggactcgccagtggtgccaacagaaacgatcgcgctagtaccgctggcgacatgataatcaatcagttttttcaagctagcccgacagacattacctttttcatccatcggagtaacaatcgcgacaatacttcccgtgaacatgggccatcctctgtgcaaacaagtgtctcaatggtacgtttggtatggcattaaaagcaagcagacagaaccgttctgattgttgtatgcatgtttttttatgctttccttaagaacaactcaccccttaaaggaataaccagtttgacactgagtagccaacattatctggtgatcactgcgttgggtgccgatcgccctggaattgtgaacaccatcacccgtcatgtcagtagttgcggctgtaatattgaagacagtcgcctggcgatgctgggagaagagttcacgtttattatgctgctttccggtagttggaatgccattactctgattgaaagtacgttaccgttgaaaggtgccgaactggatcttttaatcgtgatgaagcgcacgacggcgcgtccgcgtccgccaatgccagcatctgtctgggttcaggtcgatgtggcagactccccgcatttaattgaacgcttcacagcacttttcgacgcgcatcatatgaacattgcggagctggtgagccgcacgcaacctgctgaaaatgaacgggctgcgcagttgcatattcagataaccgcccacagccccgcatctgcggacgcagcaaatattgagcaagcgttcaaagccctatgtacagaactcaatgcacaaggcagtattaacgtcgtcaattattcccaacatgatgaacaggatggagttaagtaatgaatccactgaaagccggtgatatcgcaccgaaatttagcttgccggatcaagacggagaacaagttaatttgaccgacttccagggacagcgtgttctggtttatttctacccgaaagccatgacccccggctgtaccgtacaggcctgcggcttacgcgataacatggatgagttgaaaaaagcgggcgttgatgtgctgggtatcagcaccgataaacccgaaaaactctcccgttttgcggaaaaagagctgcttaactttacgctcctgtctgatgaggaccaccaggtgtgcgaacaattcggcgtctggggtgaaaagtccttcatgggcaaaacctacgatggcattcatcgcatcagcttcctgattgacgctgatggcaaaatcgaacatgtctttgacgatttcaaaaccagcaatcaccacgacgttgtgctgaactggctgaaagaacacgcctgattactttgctccattccgtgctggctgcgcttgcggccagcatacctcacttctcgtgatcaagatcacattctcgctttcccctgcgacacgggtgtcgaatccattttttgctgaacgttaatgaccatcatttttgtaccgttcagaatccagttaatacataacttattgaatatattgagttaatcagaatggcatcctttatgcaatatgaaatgcaatgtttcatatcattttcaaggagccgacatgaaccgctttgtggtggccgaaccactgtggtgtacaggatgtaatacctgtctcgctgcctgtagcgacgtgcataaaacgcaaggtttacagcaacacccgcgcctggccctggcgaagacgagtacaatcactgcccctgtcgtgtgtcatcactgtgaggaagccccttgcctgcaggtctgcccggtcaatgccatctctcagagggatgatgcgatccaactcaacgaaagcctctgtattggctgcaagctttgcgccgtggtctgcccatttggcgcaatcagcgctagtggaagccgtccggtgaatgcccatgcgcaatatgtttttcaggctgaaggcagtctcaaagacggcgaagaaaacgcgccaacacaacatgctttgctgcgctgggaacctggtgtccagaccgtcgcggtgaaatgcgacctgtgtgatttcttgccagaaggtccggcctgcgttcgcgcttgcccgaatcaggcgttacggctgatcaccggtgatagcctgcaacgtcagatgaaagaaaaacagcgccttgccgcaagctggtttgccaatggcggggaggatcccctttccctcactcaggagcaacgctaatggatgccctgcaattattaacctggagcctgattctctatctgtttgctagtctggctagcctgtttttactcggcctggacagactggctattaagctttccggcatcacaagcctggtgggcggcgtgattggcatcatcagcggaattacgcaattacatgctggtgtaactttagtcgcccgttttgcccccccttttgaatttgccgatttaaccctgcgaatggatagcctcagcgcatttatggtgctggttatctccttgctggtggtggtttgttctctctatagtttgacttatatgcgcgaatacgagggcaaaggcgcggcggcgatgggcttctttatgaatattttcatcgcaagcatggttgccctgctggtgatggacaacgctttttggttcatcgtgctgtttgaaatgatgagcctgtcttcctggtttctggtcattgccaggcaggataaaacgagcatcaacgctggcatgctctacttttttatcgcccacgccggaagcgtgctgataatgatcgccttcttgctgatggggcgcgaaagcggcagcctcgattttgccagtttccgcacgcttagtctttctccggggctggcgagcgcggtgttcctgctggcctttttcggttttggcgcgaaagccgggatgatgccgttgcacagctggttgccgcgcgctcaccctgccgcaccaagccacgctagcgcgttgatgtctggcgtaatggtcaaaataggtattttcggcatcctgaaagtagcgatggatctgctggcgcaaacgggtttgcctctgtggtggggcattctggtgatggcgatcggcgcaatctccgcgctcctgggcgtgctatatgcgctggcggaacaggatatcaaacggctgctggcctggagtaccgtcgaaaacgtcggcattattttgctggcagtcggtgtggcgatggtcggtctgagtctgcacgacccgctgctcaccgtggttggactgctcggcgcactgtttcatctgctcaaccatgcgctgttcaaagggctgctatttctcggcgcgggagcgattattagccgtttgcatacccacgacatggaaaaaatgggggcactagcgaaacggatgccgtggacagccgcagcatgcctgattggttgcctcgcgataagcgccattcctccgctgaatggttttatcagcgaatggtacacctggcagagcctgttcagtctaagtcgtgtggaagccgtagcgctacaacttgcgggtcctattgctatggtaatgctggcagtcactggtgggctggcagtaatgtgcttcgtaaaaatgtacggtattactttctgtggtgcgccgcgcagtacacacgctgaagaggcacaggaagtgccaaatacgatgatcgtcgccatgctactgctcgcggcactctgcgtattaattgcgcttagtgccagttggctggcaccgaagataatgcatattgcccatgcgtttaccaatacccctcccgccactgtcgccagcggaatagcacttgtacccggcacgtttcatacacaggtcacccccagtttactgttgctgttactactggcgatgcctttgctgcctggcctttactggctgtggtgtcgtagccgccgcgcagcgtttcgtcgcacaggagatgcctgggcatgcggctacggctgggaaaatgcgatggccccgagtggcaatggcgtgatgcagccgctgcgtgtggtcttttctgcgctatttcgtctacgacaacagctcgaccctacgctgaggctaaataaaggtcttgcgcacgtcaccgccagggctcagagcacagaacccttctgggatgagcgggtgatccgccccatcgtgagcgccacccaacggctggccaaagaaatacagcatctgcaaagcggcgactttcgtctctattgcctgtatgtggtcgccgcactggttgtgctgctaatcgctattgccgtctaaggaaatcaccatgagacaaactctttgcgacggatatctggtcatttttgcgttagcacaggccgtgattctgctgatgctaaccccactttttacgggtatttcccggcagatacgcgcgcgtatgcactcccgccgcgggccggggatctggcaggattatcgcgatatccacaaactgtttaaacgccaggaagttgcgccgacatctagtggtctgatgttccgcctgatgccgtgggtattaatcagcagcatgctggtgctggcgatggccttaccactgtttattaccgtttccccttttgcgggcggcggcgatctgatcacccttatctatcttcttgccctgtttcgttttttctttgctctttccgggctggataccggaagtccgtttgcgggagtcggtgccagtcgcgagttgacgctcggcattctggtcgaaccaatgcttattctcagtctgctggtattggcgctgatagcaggttccacgcatatcgagatgatcagcaatacgctggcgatgggctggaacagcccgctaaccaccgtactggcgttactggcctgtggttttgcctgcttcattgagatgggaaaaattccctttgatgttgctgaagcagaacaggaattacaggaaggcccgctgaccgaatattccggtgccgggctggcgctagcgaaatgggggctggggctgaaacaggtcgtgatggcaagtctgtttgtggccctgtttctgccctttgggcgcgcgcaagaactttctctcgcctgcctgctgactagtcttgtcgttacgctgctcaaggttttgctgatttttgtactggccagtatcgcagaaaacacgctggcacgcgggcgttttttactcattcaccatgtgacctggcttggcttcagccttgctgcgcttgcatgggtcttctggttaaccggtctgtaaggagcactgacggaatatggaaaatcttgctctgacgacgttattgctgccttttatcggcgcactggtcgttagctttagcccacaacgtcgggccgccgaatggggggttttgttcgccgcgctgaccacgctgtgcatgttgagtctgatctccgcgttttatcaggccgataaagttgccgtcacgttgacgttggtcaacgtgggggatgtggcgttgtttggcctggtcattgatcgcgtgagtacgctgattctgtttgtggtggtgtttctcggtttgctggtcacgatctactccacgggttatctgacggataaaaatcgcgaacacccgcataacggcacgaatcgttattacgcatttttactggtgtttatcggcgcgatggcgggactggtactctccagcacgctgctcggtcagttgttgttttttgaaattacaggcggctgctcctgggcgttgatcagttattaccagagcgataaagcgcagcgtagtgcactaaaagcgttacttatcactcatatcggcagcttggggttgtatcttgccgccgccacgctgtttttgcagaccggaacgtttgcgcttagcgcgatgagcgagttacacggcgacgcacgttatctggtttatggcggcatcctgtttgccgcgtgggggaaaagcgcccagctaccgatgcaagcgtggctaccggacgcaatggaagcgccaacaccgatcagcgcctatctccacgccgcaagcatggtgaaagtgggcgtttacatttttgcccgcgctattatcgacggcggcaatatcccgcatgtgattggcggcgttggcatggtcatggcactggtcaccattctttatggctttctgatgtatttgccacagcaggatatgaagcggttgctagcctggagcaccatcactcaacttggctggatgttcttcggcttgagcctctccatcttcggcagccggctggcgctggagggcagcatcgcctacatcgtcaaccacgcgttcgctaaaagcctgtttttccttgtagcaggtgcgctgagttacagctgcggcacgcgcttgttgccgcgtctgcgtggcgtattgcacaccctgccgttgccaggcgtgggtttctgcgtggcagcgctggcgattaccggcgtgccgccgttcaacggcttcttcagtaaattcccgctgtttgctgccggttttgcgttgagtgtggagtactggatcctgctgcccgccatgattcttctgatgattgaaagcgtcgccagtttcgcctggtttattcgctggtttggtcgcgttgtgcctggcaaaccgagcgaggccgtcgccgatgccgcaccgctgccaggaagtatgcgcctggtgttgattgtactgattgtgatgagcctgatttccagcgtaatcgccgcgacctggttgcagtaaggagatgatgaatgaccggttctatgatcgtaaataatctggcgggactgatgatgctgacaagcctgtttgtgattagcgtcaaaagctatcgcctgagttgcggattttacgcctgccagagtctggtgctggtgtctattttcgccactctcagctgcctgttcgccgcagagcaactgctgatctggtccgccagcgcctttatcaccaaagtgctgctggtaccgttaatcatgacttacgctgcacgaaatattccccagaacatcccggaaaaagcgttattcggtccggcaatgatggcactgctcgcggcgttaattgtcctgctttgcgcatttgtcgttcagcccgtgaagctaccgatggctaccgggctgaaaccggcgctggcggtagcgttaggtcattttctgcttggcctgctgtgcattgtcagccagcgcaatatcctgcggcaaatttttggttactgcctgatggaaaacggctcccatctggtgctggcgcttcttgcctggcgagcaccggaactggtggaaataggtatcgctaccgacgccatcttcgccgtcattgtgatggtgttactggcaagaaaaatatggcgtacccacggcacgctggacgtgaacaacttgaccgcgctgaagggataatgagatgagttattctgtgatgttcgctttactcctgctcacgccgctgctttttagcctgctctgttttgcctgccggaaacggagactttctgcgactcgcacggtgaccgtattacatagcttagggatcacactgctgctgattctggcactctgggtggtccaaactgccgctgatgcaggagaaatattcgctgcgggactgtggcttcatattgatggtctgggcggtttgttcctcgccattcttggtgtgattggctttctcaccggtatttacagcattggctacatgcgtcatgaagtggcacacggcgagcttagtcccgttacgctgtgcgattactacggtttcttccatctgtttttgttcaccatgctgctggttgttaccagcaataacctgattgtgatgtgggcggcgatcgaagccaccaccttaagcagcgcgtttctggtaggcatttacggtcagcgtagtagcctggaagctgcatggaagtacatcattatttgtactgttggtgtcgcttttggtctgttcggtaccgtgctggtatacgccaacgccgccagcgttatgccgcaggcagaaatggcgatattctggagcgaggttcttaagcaaagctccttgcttgacccaacattaatgctgttggcctttgtgtttttgctaattggctttggtaccaaaaccgggctatttcccatgcacgcctggctgccggatgctcacagtgaagcgccgagtccggtcagcgccctgctctccgccgtattgctgaactgcgcgctgttggtgctgattcgctattacatcattatttgccaagccatcggcagcgatttccccaaccggttgttgctcatcttcggcatgttgagcgttgccgtggcggcatttttcattctggtacagcgggacattaagcgtctgctggcgtactccagcgtggagaacatggggctggtcgcggtggagctaggcattggcgggccgctgggaatttttgccgcgctgctgcacatcttaaaccacagtctggcaaaaacgctgctgttctgcggttccggcaatgtactgctcaagtacggcacgcgcgatctcaacgtcgtctgtgggatgctcaaaatcatgccatttaccgccgtgctgtttggcggcggtgcgctggcgctggcagggatgccgcccttcaacatttttcttagcgaatttatgaccattaccgccggactggcacgtaatcacctgctgattatcgtcctgctgttattgctgttaacgctggtgctggcgggcctggtacggatggctgcgcgggtgttaatggcgaaaccgccgcaggccgttaaccggggtgatctcggctggttgaccaccagcccaatggtgattctgctggtcatgatgctggcgatgggaacgcatattccacaacctgtcatcaggatcctggcgggcgcttccactatagtcctcagtgggacgcacgatctgcctgcacaacgtagcacctggcatgattttttgcctagtggcaccgcatctgttagcgagaaacacagtgaacgttaatagtagcagtaatcgtggcgaagcgattctcgccgccctgaaaacgcagttccccggcgcggtgctggatgaagagcgacaaacgcctgaacaggtcaccattacggtgaaaatcaatctgctgcctgacgttgtacagtatctttattatcaacatgatggctggcttccggtcctgtttggcaacgacgagcggacacttaacggtcattacgcggtttattatgcccttagtatggaaggggccgaaaaatgctggattgtggtgaaggcgctggtcgatgccgacagtcgggagtttccgagtgtcacaccgcgcgtccctgccgcggtctggggcgagcgagaaattcgcgatatgtacgggctgattccggttggcctgccggatcagcgtcgcctggtgttgcccgatgactggccggaagatatgcatccgctgcgcaaagatgcgatggattatcgactgcgccctgaaccgacgactgattccgaaacgtatccgtttatcaatgagggcaacagcgatgcgcgggtgatccctgtcggcccgctgcatatcacctccgatgaaccgggtcacttccgcttgtttgtggatggcgagcaaattgtcgatgctgattaccgcctgttttatgtccatcgcggcatggagaaactggcagaaacgcggatgggctacaacgaagtgaccttcttaagcgaccgcgtgtgtgggatttgcggttttgcccacagtgtggcctataccaatagcgttgaaaatgcactggggattgaggtgccgcaacgagcacatactattcgcagcattctgctggaagtcgaacggctacacagtcatttgcttaaccttggcctctcctgccatttcgttggttttgataccggctttatgcaatttttccgcgtgcgggaaaagagcatgacgatggcggaattgctgatcgggagccgtaaaacctacggtctgaatctgattggtggtgttcgccgcgatattctcaaagagcaacgtctgcaaacgctgaaactggtgcgcgagatgcgcgccgacgtgagcgagctggtagagatgctgcttgctacgccgaatatggaacaacgcactcagggcattggcattctcgaccgacaaatcgcccgtgatttgcgctttgatcacccctacgccgactacggcaatattccaaaaacactgtttacctttaccggcggcgatgttttctcccgcgtgatggtccgtgtcaaagagacgtttgatagcctggcaatgctggaatttgccctcgacaacatgccggataccccactgctgaccgaaggctttagctataaacctcacgcattcgcgctgggctttgttgaagcgccacgcggtgaagacgtgcactggagcatgctcggtgataaccaaaaattgttccgctggcgctgccgtgccgccacctacgccaactggccggtgttgcgttacatgctgcgcggcaataccgtttctgacgcaccgctgattatcggtagccttgatccctgctactcctgtaccgaccgtgtgacgctggtagatgtgcgcaagcgccagagtaaaaccgtgccgtataaagagatcgaacgctacggcattgatcgtaaccgtagcccgctgaagtaaggacagaagatgctgaagttactgaaaactattatgcgcgccggaaccgcgacggtgaaatatcccttcgcgccactggaggtcagccctggctttcgcggaaaaccggacctgatgcccagccaatgtattgcctgcggtgcctgcgcctgtgcttgtccggcaaatgcgctggctatccagaccgacgaccagcaaaatagccgcacctggcagctctatctggggcgttgtatttactgcggacgttgtgaagaagtgtgcccgaccagagccatccagcttaccaataactttgaactgaccgtcaccaataaagccgatctctatacccgcgcgacgttccatctacaacgttgcagccgttgcgaacgcccgtttgccccgcaaaaaaccatcgcactggctgctgaattgttagcacagcaacaaagtgcgccacaaaaccgcgaaatgttgtgggcgcaagcgagcgtctgcccggaatgcaaacaacgcgcgacgctgatcaacgacgatacagatgtactgctggtggctaaggagcagctatgagtccagtgcttacacaacatgtcagccagcccatcacgctggacgagcaaacgcaaaagatgaagcggcatttgctacaggatatccgtcgcagcgcttacgtttatcgcgtcgattgcggcggctgcaacgcctgtgaaatcgaaatttttgctgccattacaccagtattcgacgcagaacgttttggcattaaggttgttagtagtccgcgtcacgccgatattttgttatttactggcgcagtcacccgggcgatgcgtatgcctgcacttcgggcgtatgagtctgcccccgatcataaaatttgtgtttcctacggcgcgtgcggtgtcggcggcggtattttccacgatctctacagcgtctggggcggtagcgacaccattgtccccattgatgtttggatccccggctgcccgccaacaccggccgccaccattcacggtttcgccgtggcgctcggtttgctgcaacagaagattcacgctgtggattatcgcgatcccaccggggtgactatgcaaccgttgtggccgcagatcccgccaagtcagcgtatcgccattgagcgagaagcgcggcggctggcgggctatcgtcaggggcgagaaatttgcgatcggctcctgcgccatttaagcgacgatcctacaggaaatcgggttaacacctggttgcgcgatgccgacgatccacgtctcaatagtatcgttcagcaactctttcgcgtactccgggggttacatgactgaagagtgcggggaaattgttttctggacgctgcgaaaaaagtttgtcgccagtagcgacgagatgccggaacacagctctcaggtaatgtattacagcctagctatcggccatcacgttggcgtgattgattgtctgaatgtcgccttccgctgcccactgacggaatacgaagattggcttgcactggtcgaagaggagcaagcccgacgtaagatgctgggggtgatgacttttggtgagattgttattgacgccagccacaccgccctgttgacccgggcattcgcgccactggcggatgacgcgacgtctgtgtggcaggcgcgtagcattcaattcattcatctgttggatgaaattgtgcaggaaccggccatctatctgatggccagaaaaattgcgtgagaaggatttctcattaataaggactgttgatggctatgagtgacgaggcgatgtttgccccgccacaaggaataacaattgaagcggtaaacggaatgctcgcggagcggttagcacagaaacacggcaaggcgtctttattacgcgccttcatcccgctgccgccgccgttcagcccggtacaacttattgaactgcatgttctcaaaagcaacttctattaccgctaccatgatgatggcagcgatgtgacggcaacaacagagtatcagggcgagatggtcgattatagccgtcacgccgtccttctcggcagtagtggaatggcggagctacgctttattcgcacccacggcagtcgttttacttcccaggattgcacactgtttaactggctggcgcggataatcaccccggttctgcaaagttggctcaatgatgaagaacagcaggtggcgctgcgtttgctggagaaagatcgcgatcatcatcgggtactggttgatattactaatgcagtgctgagtcatcttgatctcgacgatctgatcgctgacgtcgctcgtgagatccatcattttttcggtctggctagtgtcagtatggtactgggcgatcatcgaaagaacgagaagttcagcctgtggtgcagcgatctttctgccagtcattgtgcgtgtctgccacgctgtatgcctggcgaaagtgtattgctgacacaaacgctacaaacccgacaaccgaccttgacgcaccgtgcagatgatctgtttctctggcaacgcgacccgttattactcttacttgcatctaacggctgcgaatctgcgctccttataccgcttacctttggcaaccatacaccgggtgcattgttgctggcgcatacctcttccactctctttagtgaggaaaactgccagctactacaacacatagccgatcgcatcgctattgccgttggcaatgccgatgcctggcgtagcatgaccgatttgcaggaaagtttgcagcaagaaaaccaccagcttagcgagcagctccttagcaatctgggcatcggtgacattatctatcaaagccaggcaatggaagacctgctccagcaggtagatattgtggcgaagagcgacagtacggtgttgatttgtggtgaaaccggaactggcaaagaggtgatcgccagagcgatccatcaacttagcccgcgacgcgacaagccgctggtcaaaatcaactgcgctgccatccccgccagtcttctggaaagtgagttattcggtcatgacaaaggggcgtttactggtgcgattaatacccatcgtggtcgttttgaaattgccgatggcggcacgttgtttctcgatgaaattggcgatctgccgttagaacttcagcctaaactgctgcgcgtattgcaggagcgggagattgagcgtctcggcgggagtagaacgatcccggtgaatgtcagagtcattgccgccaccaaccgtgatttgtggcaaatggttgaagatcgccagtttcgcagcgatctcttttatcgcctgaatgtcttcccactggaattgccgccgctacgcgaccgtccggaagatatccctcttttagcaaaacatttcacgcaaaaaatggcgcgccatatgaatcgcgcaattgacgccatcccgaccgaggcactacgccagttgatgagctgggattggccgggcaacgtgcgcgagctggaaaacgtgattgagcgggcggtactgttgactcgtggtaacagtctgaatttacatctaaatgtccgacaaagccgtttactgccgacgctaaatgaagatagtgcgcttcgcagtagtatggcgcagttactgcacccgacgacgccagagaatgacgaagaagaacgtcagcgcattgttcaggtattgcgagaaaccaatggcattgttgccgggccccgtggcgcagcgacgcgattagggatgaagcgcaccacgctgctgagtcgaatgcagcggctggggatcagcgttcgcgaggtgttgtaatctgcttttgcaggagtatgcatgagaaacaaactctctttcgacttgcagttgagcgccagaaaagcggcaatcgctgaacggattgccgcccataaaattgcccgcagtaaagtgagcgtctttttaatggcgatgtccgctggcgtgtttatggcgatcggatttactttttacctttccgttatcgccgatgccccgtctagtcaggcattaacccatctggtgggcggcctttgctttacactcggctttattttgctggcggtttgcggcaccagcctgttcaccagcagcgtaatgacggtgatggcaaaaagtcggggcgtcattagttggcgaacttggctgattaacgcacttctggtggcctgcggtaatctggcaggtattgcctgtttcagtttgttaatctggttttccgggttggtgatgagtgaaaacgcgatgtggggagtcgcggttttacactgcgccgagggcaaaatgcatcatacatttactgaatctgtcagcctcggcattatgtgcaatctgatggtttgcctggcgctgtggatgagttattgcgggcgtagcttatgcgacaaaatcgtcgccatgattttgcccatcaccctgtttgtcgccagtggctttgagcactgtatcgccaatttgtttgtgattccgttcgccattgccattcgccatttcgcccctccccccttctggcagctggcgcacagtagcgcagacaattttccggcactgacggtcagccattttattaccgccaatctgctcccggtgatgctgggtaatattatcggcggtgcggtgctggtgagtatgtgttatcgggctatttatttacgtcaggaaccctgaaaaatcagcccggcgaaacagttcgtcgggctgaagattattcttgcgcgatttgcccatcgggccaggcatgaatcacggctttgatcagcgtcgccaacggaatggcgaagaatacgccccagaatccccacaaaccaccgaagatcaccacgcttaaaataatcaccagcggatgcaggttaaccgcttcggagaacaacaccggcactaacaggttgccgtccagcgcctgaataatcagatacaccgcgaagcagctccagaattcagtacctgcgccaaactggaatagcgccacgccaaccaccggaatggtcaccacaaatgcgccaatgtacggaataagaacgctgaagccgaccagcactgccagcagcaggctatagttcagcccgaagagcaagaaccccagccaggtggcgatccccaccacgatcatctccagcactttgccgcggatatagttggtgatttgttgattcatctccttccacacctgtcctgccagcccacggttacgcggcagcacccggcgaacggcgttcagcatctgctctttgtctttcagcaggaagaagaccatcaatggcaccagcaccagatagacggctatggtcagcaaaccgaccaggctggcgagggaaattttcaccacgctatcgcccatggtcagcatccgactgcgcatattttcggccattgcatcaataatgcccgcgtccattaacgccggatagcggcgcggcaacgtggcggcaaagtcagaaagcttattgagcatccccggcatatcgcggattaagtagatgccctgttgccaggcgataggcagtaccacgaacgccatcagtagcaatataccgacgaaaaccaccaatacaatgctcgtcgcccagcggcgggagcagccaatagattgcagacgcacggttggccattccagcaaataggccagcacaatagccaccagcaacggagcaagcaggccactaaagaaaaagataatgccaaatccggcaactaaaataaccagcaaggcaatcgcttccgggtcgctaaaacggcggcgataccattgcatcaacatttcgagcataaagaccttccctgaacctcaagagcgggattgcgatccgcaattgtatcgaaatgtcacaaaaaagacttcgctttttatgacggattcaggaaactgaaaagtcatttgagtgggctaatcttcgccgttacactcaaaggcggcgcggtgggaacgatatttcacagtatcggtcaaatgactatctccagaaatacaggatagaggttatgttcaggcagttgaaaaaaaacctggttgcaaccctcattgctgctatgaccattggtcaggtagccccggcgtttgccgacagcgcagacaccttgccggatatgggaacctccgcaggaagcacgctttccattggtcaggaaatgcagatgggcgactattatgtccgccagctacgcggcagcgcgccgttaattaatgacccgctgttaacgcaatatattaatagcctggggatgcgtctggttagccatgccaatagcgttaagacaccgtttcatttttttctgatcaacaacgacgaaattaacgcctttgctttctttggcggcaacgtggtgctgcactctgccctgttccgttattccgataacgaaagtcaactggctagtgttatggcgcacgaaatctcccacgtcacccaacgtcacctggcgcgagcgatggaagatcagcagcgcagcgcgccgctgacctgggtcggcgcgttaggttctattttactggcgatggccagtccgcaggcggggatggcggcgctgaccggtacactggcgggaacgcgtcaggggatgatcagtttcacccagcaaaatgaacaggaagcggaccgcattggtattcaggtgctgcaacgcagcggattcgatccgcaggcgatgccaaccttcctcgaaaaattactcgatcaggcgcgttactccagccgcccgccggaaattttattgactcacccgttgccggaaagtcgtctggcagatgcccgcaaccgtgctaatcagatgcgcccgatggtggtgcagagcagcgaagatttctatctggcgaaagcgcgcacactggggatgtataattccggacgtaaccagctcaccagtgatttgctggatgaatgggcgaaaggaaacgttcgtcagcaacgagcagcacaatatggtcgtgctttacaggcgatggaagccaataaatacgacgaggcgcgtaaaacgctgcaaccgttactggcggcagaacctggcaacgcatggtatctcgatctggctactgatatcgatcttgggcaaaacaaagccaatgaggcgatcaatcgtctgaaaaatgcccgcgatttacgcaccaatccggtgttgcagctcaacctggcgaacgcttatttgcaaggcggtcaaccacaagaagcggccaatattctgaatcgctacacctttaataataaagatgacagcaacggctgggatttgctggcacaggcggaagccgcgctaaataaccgcgatcaggagctggctgcgcgagcagaaggttatgcgctcgccggacgactcgatcaggccattagcctgttgagtagcgccagtagccaggtgaaattaggcagcctgcaacaagcgcgttacgatgcgcgcatcgaccagttgcgccagctgcaggaacgctttaagccttataccaagatgtaattcgcattaaaggaagaacaatgaccaaacaggtaaaaatctaccataacccacgctgtagtaagagccgggaaacgctgaacctgctgaaagaaaacggcgtggagccagaagtggtgctctaccttgagacacccgccgatgcggcaacgctgcgcgatttgctgaaaatactggggatgaatagcgcccgtgaattgatgcgccagaaagaggatctttataaagaactgaacctggctgacagtagccttagcgaagaggcgctgattcaggcaatggtggataatccgaagctgatggagcgcccgattgtggtcgcgaatggcaaagcgcggattggtcgtccaccggagcaggtactggaaatcgtgggttaagatgtgctccatcgctagttgaagcacattgccggatgcgacgcttgccacgtcttatccggcctacgaatactatggattaacttcgcgtagttcggataaggcgttcgcgccgcatccgacaataaacaccttatttacaacttcagaatttctttcacaaacggaatggtcagcttacgttgcgcggtaatgctcgcacgatccaactgatccaacgtcataaatagcgtgcgcatttctctgtcgagccgcttcagcaagaaacgccccacatcttccggcagttcaaaaccacgcaaacgcgcgcgtaactgtagcgcctgcaacttatcttcatcagaaagtggctgcaatttgtagatctgcccccagtcgagtcggctcgcgagatccggtaatcccagattcaactgccgcggtggacgatcgccggtgatcaacaaccgtgttttgccgctttccagaattcgattgtagagatcgaaaatcgccatctcccacaactcatcgcctgcaatacactcaatgttgtcgatacagaccaggctcaaatgctccataccgtcgagcacttccggaacaaaccaggtgcgtttatccagcgggacatagcccaccgcatcgccacgctggctcaattccgcgcaagccgcgtgcagcagatggctgcgccccgcgccttcgcgtgcccagagatagatgtaaccgctatgttcctgacgcagcacgttttgcagcgcggccagtaaagaggagttatcccccggccagaaacttgcaaaggtttcgtcgtcaggaagataaagtggcaaagagagctgtgccggtgtgttcagagatacctcaaccaggatttcacaaaatcggctgaagtttaccacagaatcccatgatgtttgaaccgggcagcaacactgcccggtcggtacattatttgtctgttatatccgcgtcttctgcgtccagcaccacttcttcagggcgcagcacactgatcagtttgaagatcaaacttaagccgataccgacgatggtcgccagcgccataccttttaactccgccgcgccgatgtttaccttcgcgccactgacgccgatgatcaaaatcacggaagtcaggatcaggttctgtgctttgttgtaatccactttgctttcgatcaaaacacgaataccggaagcaccgatgacaccataaagcagcaggctaacgccgcccatcaccggcaatgggatcatctggatagcggcagccagtttaccgacgcaggaaagcaggatagcgaaaatcgccgccccgccgataacccaggtactgtaaacacgggtgatcgccatcacgccaatgttttctccgtaagtagtatttggcgtagagccaaagaagccggaaatcacggtgctcaagccattagcaaacatgctacggtgcagacctggatcgcgcagcagatcttttttgacgatattagccgttactaccaggtgccctacgtgttcggcaataaccactaacgccgctggcagaatagtcagaatggcaaaccactcgaagcgcggcgtatagagggttggcagcgcaaaccagtgagcattaataatcggcgtggtatcgacaattcccattgcgaaagagagcgcgtaccccaccagcacgccaattaaaatcgggataattgccaggaaaccacgaaacagcacggaacctaaaaccgtgaccgccagggtggtaatagagatgatgatggttttggagtctggcgtttgcccttcagccgggagtaaacccgccataccggcagctacgcccgccagctccagaccgatgacggcaacgattgcgcccattgccgcaggtggaaacagcacgtccagccagccggtccccgctttcttcacgataaaagaaaccaggcagaacagcacgccgcacataataaagccgcccagcgcgacttcataccctaacggcaacagtaacaataccggactaataaaggcaaagctggaaccaagataagccggaattttccctttacagatgaagagatacagcagcgttccaataccgttaaataacagtacagtcgccgggttaatatgaaataagacgggcaccaggacggttgcaccaaacatggcgaacaaatgttgcaaactaagcgggattgtctgtaaaagtggcggtctttcactcaccccgatagcacggcgcgtcatagtattatcctctgtattatgtgttataggcgctttactcaaaaaaaagccgactcttaaagtcggctttaattatttttattctttatttcgtaccaaagattttgtcaccggcatcgccgaggcccggaataatgtatccgtgctcgttcagtccctgatcaatgcttgcggtatacagttcgacgtccgggtgcgctttttccagcgcagcgataccttctggcgcagctaccagcaccagaactttgatgctgctgcagcccgcttttttcagcaggtcgatggtcgcgataacggaaccaccggttgccagcattgggtcaacgatcagcgccatacgctcatcgatgttagaaaccagtttctggaagtacggtaccggctccagcgtttcttcattacggtacataccgacaacgctgatgcgcgcgctcggaacgttttccagcacaccgtccatcataccaagacccgcacgcagaattggcacaacggtaattttcttacctttgatctggtcgatttctaccgggccgttccagccttcgatagttactttttccgtttcgaggtcggcggtcgcttcgtaagtcagcaggctacccacttcggaagcgagttcgcgaaagcgcttggtgctgatatcttgctcacgcatcagtcccagcttgtgtttgacgagtgggtgtttgacttccacgatcttcatactctttctcctttgaggggcagccacaaaaaaaatcgacggattatacctcctttcttcaaggcggcaatattcttttcgttgactttagtcaaaatgataacggtttgagataaagttattttatattcagatggttatgaaagaagattattccatccgaaaactaacctttaccctggcacaagtcttctttcgccgcgcgcctggggaaaagacgtgcaaaaaggttgtgtaaagcagtctcgcaaacgtttgctttccctgttagaattgcgccgaattttatttttctaccgcaagtaacgcgtggggacccaagcagtgaccgataaaacctctcttagctacaaagatgccggtgttgatattgacgcgggtaatgctctggttggaagaatcaaaggcgtagtgaagaaaacgcgtcgtccggaagtgatgggcggtctgggcggcttcggtgcgctgtgtgcattgccgcaaaaatatcgtgaacccgtgctggtttctggcactgacggcgtaggtaccaagctgcgtctggcaatggacttaaaacgtcacgacaccattggtattgatctggtcgccatgtgcgttaatgacctggtggtgcaaggtgcagagccgctgtttttcctcgactattacgcaaccggaaaactggatgttgataccgctagtgcggtgatcagcggcattgcggaaggttgtctgcaaagtggctgtagtctggtgggtggcgaaacggcagaaatgccggggatgtatcacggtgaggattacgatgtcgcgggtttctgcgttggcgtggtagaaaaaagtgaaatcatcgacggctctaaagtcagcgacggcgatgtgctgattgcactcggttccagcggtccacacagcaacggctatagcctggtgcgcaaaattcttgaagtcagcggttgtgatccgcaaaccaccgaacttgatggtaagccattagccgatcatctgctggcaccgacccgcatttacgtgaagagtgtgctggagttgattgaaaaggtcgatgtgcatgccattgcgcacctgaccggcggcggcttctgggaaaacattccgcgcgtattgccagataatactcaggcagtgattgatgaatcttcctggcagtggccggaagtgttcaactggctgcaaacggcaggtaacgttgagcaccatgaaatgtatcgcaccttcaactgcggcgtcgggatgattattgccctgcctgctccggaagtggacaaagccctcgccctgctcaatgccaacggtgaaaacgcgtggaaaatcggtatcatcaaagcctctgattccgaacaacgcgtggttatcgaataatgaatattgtggtgcttatttccggcaacggaagtaatttacaggcaattattgacgcctgtaaaaccaacaaaattaaaggcaccgtacgggcagttttcagcaataaggccgacgcgttcggccttgaacgcgcccgccaggcgggtattgcaacgcatacgctcatcgccagcgcgtttgacagtcgtgaagcctatgaccgggagttgattcatgaaatcgacatgtacgcacccgatgtggtcgtgctggctggttttatgcgcattctcagcccggcgtttgtctcccactatgccgggcgtttgctgaacattcacccttctctgctgccgaaatatcccggattacacacccatcgtcaggcgctggaaaatggcgatgaagagcacggtacaagcgtgcatttcgtcaccgatgaactggacggtggcccggttattttacaggcgaaagtcccggtatttgctggtgatagcgaagatgacatcaccgcccgcgtgcaaacccaggaacacgccatttatccactggtgattagctggtttgccgatggtcgtctgaaaatgcacgaaaacgccgcgtggctggatggtcaacgtctgccgccgcagggctacgctgccgacgagtaatacccccgtaattaaagcgccagctctgccgctggcgtttttcaattcacctgtaaatcgcaagctccagcagtttttttcccccttttctggcatagttggacatctgccaatattgctcgccataatatccaggcagtgtcccgtgaataaaacggagtaaaagtggtaatgggtcaggaaaagctatacatcgaaaaagagctcagttggttaagcttcaatgaacgcgtgcttcaggaagcggcggacaaatctaacccgctgattgaaaggatgcgtttcctggggatctattccaataaccttgatgagttctataaagtccgcttcgctgaactgaagcgacgcatcattattagcgaagaacaaggctccaactctcattcccgccatttactgggcaaaattcagtcccgggtgctgaaagccgatcaggaattcgacggcctctacaacgagctattgctggagatggcgcgcaaccagatcttcctgattaatgaacgccagctctccgtcaatcaacaaaactggctgcgtcattattttaagcagtatctgcgtcagcacattacgccgattttaatcaatcctgacactgacttagtgcagttcctgaaagatgattacacctatctggcggtggaaattatccgtggcgataccatccgttacgcgctgctggagatcccaagtgataaagtgccgcgctttgtgaatttaccgccagaagcgccgcgtcgacgcaagccgatgattcttctggataacattctgcgttactgccttgatgatattttcaaaggcttctttgattatgacgcgctgaatgcctatagtatgaagatgacccgcgatgccgaatacgatttagtgcatgagatggaagccagcctgatggagttgatgtcttccagtctcaagcagcgtttaactgctgagccggtgcgttttgtttatcagcgcgatatgcccaatgcgctggttgaagtgttacgcgaaaaactgactatttcccgctacgactccatcgtccccggcggtcgttatcataattttaaagactttattaatttccccaatgtcggcaaagccaatctggtgaacaaaccactgccgcgtttacgccatatttggtttgataaagcccagttccgcaatggttttgatgccattcgcgaacgcgatgtgttgctctattatccttatcacacctttgagcatgtgctggaactgctgcgtcaggctagcttcgacccgagcgtactggcgattaaaattaacatttaccgcgtggcgaaagatagtcgcatcatcgacagcatgatccacgccgcacataacggtaagaaagtcaccgtggtggttgagttacaggcgcgtttcgacgaagaagccaacattcactgggcgaagcgcctgaccgaagcaggcgtgcacgttatcttctctgcgccggggctgaaaattcacgccaaactgttcctgattagtcgtaaagaaaacggtgaagtggtgcgttatgcacacatcgggaccgggaactttaacgaaaaaaccgcgcgtctttatactgactatagcttgctgaccgccgatgcgcgcatcaccaacgaagtacggcgggtatttaactttattgaaaacccataccgtccggtgacatttgattatttaatggtaagcccgcaaaactcccgccgcctattgtatgaaatggtggaccgcgagatcgccaacgcgcagcaagggctgcccagtggtatcaccctgaagctaaataaccttgtcgataaaggcctggttgatcgtctgtatgcggcctccagctccggcgtaccggttaatctgctggttcgcggaatgtgtagcctgatccccaatctggaaggcattagcgacaacattcgtgccatcagtattgttgaccgttaccttgaacatgaccgggtttatatttttgaaaatggcggcgataaaaaggtctacctttcttccgccgactggatgacgcgcaatattgattatcgtattgaagtggcgacgccgctgctcgatccgcgcctgaagcagcgggtactggacatcatcgacatattgttcagcgatacggtcaaagcacgttatatcgataaagaactcagtaatcgctacgttccccgcggcaatcgccgcaaagtacgggcgcagttggcgatttatgactacatcaaaagtctcgaacaacctgaataaccctatgccaatacacgataaatcccctcgtccgcaggagtttgctgcggtcgatcttggtagtaacagttttcacatggtcatagcccgtgtggtagatggtgccatgcagattattggccgcctgaaacagcgggtgcatctggcggacggcctggggccagataatatgttgagtgaagaggcaatgacgcgcggtttaaactgtctgagcctgtttgccgaacggctacaagggttttctcctgccagcgtctgtatagttggtacccatacgctgcgtcaggcgctgaacgccactgactttctgaaacgcgcggaaaaggtcattccctacccgattgaaattatttccggtaatgaagaagcccgtctgatttttatgggcgtggaacatacccaaccggaaaaaggtcgcaaactggttattgatattggcggcggatctacggaactggtgattggtgaaaatttcgaacctattctcgttgaaagccgccggatgggttgtgtcagctttgcccagctttattttcctggcggggtcatcaataaagagaattttcagcgcgctcgcatggcggcagcacaaaaactggaaactttaacctggcaattccgtattcagggctggaacgttgcaatgggcgcttccggtaccataaaagccgcccatgaagtgttaatggaaatgggcgagaaagacgggataattaccccggaacgtctggaaaaactggtaaaagaagttttacgtcaccgtaatttcgcaagcctgagtttaccgggtctttccgaagagcggaaaacagtcttcgttccgggactggcgattttatgcggtgtgtttgatgctttagccatccgtgaactgcgcctttctgacggggcgttacgcgaaggcgtactgtatgaaatggaaggacgtttccgtcatcaggatgtgcgtagtcgcaccgccagcagcctcgccaaccagtatcacatcgacagcgaacaggcccgacgggtgctggataccactatgcaaatgtacgaacagtggcgggaacagcaaccgaagctggcgcatccgcaactggaggcgctactgcgatgggccgccatgctgcatgaggtcgggttgaatatcaaccacagcggtttgcatcgccactccgcttatattctgcaaaacagtgacttgccgggttttaatcaggaacagcagctgatgatggcgacactggtgcgctatcaccgtaaagcgattaagctcgacgatctaccgcgctttaccttgtttaagaagaaacagttcctgccactgatacagctattgcgccttggcgtattactcaacaatcaacgtcaggcaaccaccacaccgccaacattgacgctgattactgatgacagtcactggacactgcgtttcccgcatgactggtttagtcagaatgcgctggtactgcttgatctggaaaaggagcaagaatactgggaaggcgtggctggctggcggttgaaaattgaagaagaaagtacaccagaaatcgccgcttaatactttgcgggccgacgagaaatgtcggcccgcattattcaggcactttcgcgaatgggttcgatttcattcagcgtatcaattaacggctgcggcttaccaataagataaccctgcatataatcgatccccaaagagagcaccgcctcgcggatctcttcgttttcaacgtactctgccactaccagcattttcttcattcgcgccaggtggcaaatgcttgccactatctgataatccagactattactcacaatattgcggataaaactgccgtcaattttaagcagatcggcattcacatttttaagccgcgcatagctggcgtagccggtgccgaaatcatcaatcgcaatctggcagcctaattcctgaagatgctgcaaggtgatttgcgcctgcttaacattggtcagagcattactttcggtgacttcaaaaataagttgccacgcttcaatctgatatttagccagcaactgactgacttcaacaggaaaacgagcctgacatacgctggttggagacagattaatagcaaaacggtgagcgggcatcttcgctctgttttcagccataaattgcagcgtatgctcaatgacccacatgtcgatactgctgcttaaaccaaattcgtgcgcgaccggcaagaagctatcggggctgatcagttcatcattctcacctttcatgcgcagaagaatttcatggtaaacatcaccacgcataccggtaatcggctgggccatcaggaaaaaatggttgtgttccagcgcctgctgtagtcgattcatcatcgcgactttatctttcaattcgcgttgcaaatacattgccccgcgacgctgcatattttccggggcgttggtcacgatggaaagttcggcgaccgtatttagctctcccagcagcaggtagatatgattcactgggctgcgcacatagcagtaactgacgccaatctgcggttgcatcggcatgccatcccaaaagaaacgaaattgcttgagatggctatccagtgcggtaatgcgctcctggtggctttctgtattcagtcgcagcgcgagatcgttaccgctaagctgataaacatcttcacccggttccagcaagggactcagccagtgagaaagtttttgcttgtattgaatccgcagcatgatgccatagttcttaaccagcatttccatgccagggatgcgtaaataacaaagcgcagaccagggggcatcacgcaacgcgcgattcagggcgcgaacatttggcagatgaaccaccgggtccacatacgcaagccgctgaatgcgtctgactaccgctctctgacgggttgccagtacagccatataattgacaataaaagagaataccagataactggaggaggttatggtcagctgcgtggtatagccaggataaatgggaatgtaattttgatagctgtggatgctgatcatcaacacgaccgcccagagcaggctaatcagcttataaccatagcgcatcgctccccacatcatcaggggcagcaataaactcaaggtataattggtgctaaaaattgtgcttttttcatttaacggcatgcataacagcaacaataaagcacctaatgccagtagccagagcgcgaactcttttttggtgactttggcatcaacctgctgttttaattggctataatagctacgtaaataaaatggatttcgcactacccgaatgatgaagtagcacagcgggacaccgatcagattacccaccagtaaggcctgataattgattaaagtcccgaggttaaaaggcatgacaccgaccagattttctctgctcgccagtaatcctacaaatgcagcaaactggaaaagtatcagaaacagcgttgcaggaaacacaatctgccagaatatacgctgggaaattaaacgggtatcaccatgactaacgttgttacgccggggagtaaagaccctgtaaccgccccaacagagaatgataatgataataaaattagccgttaaacttagcgtttcgtaaaaacccagctctgcatatttgcggacaaaaatccctaaggcgatccctggcaatgccgcccagctgaaaaacatcatcatgctgatcatcagtgccagaggcagataaaagagaaaaacctcaccggaagaaatatgcgcgaaagtattaatgtgggcgaaaatgggcaagattaaagaaggcaggaacagcggaagcccccaccatttatcacgtatttttatataagttgcattcagtttcatagatgctcagcagaatcccccacatcctgaaggaggtgtattcagacaggcatcccacctgacttcgaatgatgattattcatcactatagagagcattgattctaagtgtcatatgaaagtaccaattgatatatatcaaacaaaataaccctgattaatgaattattacgtttatcatgttaattcatcattattacatcatcattgtaaataattaaattaacttccataacattaaaatatgtatccactgacgcttttttacataacgaagaattgaccattttgtcctgttgtgccttaatgtaagtaccgtccacagcgtgggacatacttcaaggaaccttttgtgagtcaggcaaccagtatgcgaaaacgacaccgatttaacagtcgcatgacccgtatcgtactgctcatcagctttatcttcttctttggccgttttatctacagctccgtcggtgcctggcagcaccatcagagcaaaaaagaagctcagcaatccacactctccgtcgaaagtccggtacaacgttaacggttaccttctccactttcacagaacataacggcacttcgctgtcggatgcttttgctgtttgggattatcaaagcggcagatattctttcatcttaaattttacgtctttatcctgactgatgtttatcctgtttggctgcgaaataaatataaaattaatatatatgttgtaatgatatatttttataaattattccctgcgtgaattttaataaatttaatctatccctttatacgcaatacatttactttcctcttttgatgatcttaaatgtcttatttttcgtaatgtgtataacaaggaatagtgatgaaatttaaaaaatgtcttctgcctgtggcaatgttagcgagtttcactctggcaggatgccagagtaatgctgacgatcatgctgccgatgtttatcaaaccgatcaactgaataccaaacaagaaactaaaaccgttaatattatttccattcttcccgcaaaagttgccgtagacaactcccaaaataaacggaacgcacaagccttcggcgcgcttattggcgcagtcgctggcggtgttatcggccacaacgtcgggtctggcagcaattccggaacgacggcaggtgcagttggcggcggagctgtaggcgcggcagcgggttctatggtgaatgataaaaccttagtggaaggtgtttctttaacctataaggaaggcaccaaagtgtatacctctacccaggtgggtaaagagtgccagtttacgacaggtttagccgttgttattaccacgacgtataacgaaacgcgtattcagccaaataccaaatgtcctgaaaagagctaataatcaggaggagtcatgaagaaagtttttctttgcgccatcttagcctccttaagctatccggctatcgccagtagtttgcaggatcaactctctgctgtcgcagaagcggaacagcaaggtaaaaatgaagagcaaaggcagcatgacgaatgggtcgcggagcgcaacagggaaatccagcaagagaagcaacgtcgcgcaaatgcccaggccgccgctaacaaaagagcggcaacggcagcggcaaataagaaagctcgtcaggataaactggacgccgaagcctctgcggacaaaaaacgcgatcaaagttatgaagatgagctacgcagcttagagattcagaaacaaaaactggcgctggcgaaagaagaagcccgcgttaagcgagaaaacgaatttatcgatcaggaactgaagcacaaagctgcgcaaaccgatgtggtgcaatctgaagctgacgccaacagaaatatgactgaaggcggtcgcgatctgatgaaaagcgtgggcaaagcagaagagaacaaaagcgacagctggtttaattaatcgatgttagtaacttcaatcctataattcttgaagataaaaaaccctctgtagtaacagagggttttgttcattcatagtgcagggtcaaatcattcccactcaatggtagctggcggcttgccgctgatgtcatacaccacgcgggaaataccgttcacttcattgataatgcggttggaaacgcgaccgaggaaatcgtacggcagatgcgcccagtgtgcggtcataaagtcgatggtttcgacagcacgcagagagacaacccagtcatacttacgaccatcgcccattacgccaacggaacgtaccggcaggaacacagtgaacgcctggctgactttgtcgtacaggtccgctttacgcagttcttcaatgaagatggcgtcagcacggcgcagcaggtcacagtactctttcttcacttcacccagaacacgaacgccaaggcctggtcccgggaacgggtgacggtacagcatgtcgtacggcaggcccagctccagaccaatcttacgcacttcgtctttgaacagctctttcagcggttcaaccaggcccatcttcatctctttcggcaggccgcccacgttgtggtgagatttgatgacgtgtgctttaccggttgcagacgccgcagattcgataacgtcagggtagatggtgccctgcgccagccacttcacgtcttccagtttcagcgcttcttcatcgaatacttcaacgaaaacgcgaccgatgattttacgttttgcttccggatcgttttcgccagccagcgcactcaggaagcgatcttctgccggtacgtgaacaatgttaagaccaaagtgatcgccaaacatatccagaacctgctctgcttcgttgaggcgcagcaggccgttgtcgacgaatacgcaagtcaggtttttaccgatagcgcggtgcagcagcattgcggttacggaggaatccacaccaccagagaggccgaggatgactttatcgtcgcctacctgctcgcggatgcgagctacagcatcgtcgataattttcgctggcgtccacagggcttcacactggcagatatcacgcacaaaacgctccagcatgcgcataccctggcgggtatgagtcacttccgggtggaactgtacgccatagaagcgtttttcttcgttagccataatggcaaacgggcagctttcggtgctggctacggtgatgaagtcggacggaatagcggtaactttatcgccgtggctcatccagacatcgagcagcggtttaccgtctgcggtcagcgcatcttcgataccgcgaaccagtgcgctgtcgtttacgacttcaacctgcgcgtagccaaattcacgttcgttagaggcttcaacgtgaccgcccaactgcattgccatggtctgcatgccatagcaaacgccgaataccggtacgcctgcttcaaagacatactgcggcgcacgcggactgttttcttcagtagtactttccgggccgccggaaagaataatgccgcttggattgaagtcacgaatttgtgcttctgtcacatcccacgcccacagttcgcagtaaacacccagctcacgcacgcggcgcgcaaccagttgagtgtactgagaaccgaagtccagaatgaggatgcgatgcttatgaatgttttccgtcattgacgcttattccgaggcaagtgaaacagataatataaatcgcccgacatgaagtcgggcgaagagaatcaggagcccagacggtagttcggggactctttagtaatggtcacgtcgtgaacgtggctttcctgaatgcccgcaccgctgatacgtacaaactccgctttagtacgcagttcgtcgatagtaccacagccggtcagacccatacaggagcgcaggccgcccatctgctggtgaatgatctctttcaggcgacctttataggctacgcgaccttcgataccttccggcaccagtttgtcggcagcgttatcgctctggaaataacggtcagaggaacctttggacatcgcgcccagggaacccataccacggtaagatttgtaagaacggccctggtagagttcgatttcacccggagattcttcagtacccgccagcatggaacctaccatcaccgcgcttgcgccagcggcgatagctttggcgatgtcgccggagaagcgaataccgccatcagcgataaccggaataccggtgccttccagggcttctactgcgtcagcaacagcggtaatctgcggaacaccgacgccagtcacgatacgagttgtacagatagagccagggccaatgccgactttaaccgcactgcaaccagcttctgccagagcgcgtgcacctgcagctgttgccacgttgccgccgataatttgcagatccggatatttagcacgggtttcacggatacgttgcagtacaccttcactgtgaccgtgggaggagtcgatcagcagaacgtcaacgcctgcggcaaccagcgcgtcaacacgctcttcgttacccgcacctgcgccaaccgctgcaccaacacgcagacggccttgctcgtctttacaggcgttcggtttacgttccgctttctggaagtctttcacggtgatcatgccgatcaggtggaattcgtcatcaaccaccagcgctttttcaacgcgtttttcgtgcatttttgccagcaccacttcacgggcttcaccttcacgcacggtgaccagacgctctttcggcgtcatgtaaacgctaaccggctggttcaggtcggtaacaaaacgcacgtcacgaccggtgataatacccaccagttcgttttcttcggtaacgaccggatagcccgcaaaaccgttacgctcggtcagttctttcacttcgcgcagcgtcgtggttggcagaacagtctgcggatcagtcaccacaccagattcgtgttttttcacacggcgaacttcttctgcctggcgttcaatggacatgtttttgtggataaagccgataccgccttcctgagccagagcaatagccaggcgcgcttccgttacggtatccattgctgcggaaagcatagggatattcagacgaatagttttcgtcagctgggtgctgaggtcagcagtattcggcagaacggtagagtgagcaggaacgaggagaacgtcgtcaaacgtcagagcttctttagcgatacgtagcatgggcaatatctcgaccagagtggttaataaatattgccgcggcattatacagagcgtaaccgattgcatctacccctttttgcaaaaaatgcttgctatccccgaagggcgggttactatcgactgaataacctgctgatttagaatttgatctcgctcacatgttaccttctcaatcccctgcaatttttaccgttagtcgcctgaatcaaacggttcgtctgctgcttgagcatgagatgggacaggtttggatcagcggcgaaatttctaatttcacgcaaccagcttccggtcactggtactttacactcaaagacgacaccgcccaggtacgctgcgcgatgttccgcaacagcaaccgccgggtgaccttccgcccacagcatgggcaacaagttttagttcgcgccaatattacgctctacgagccgcgcggcgactaccagataatcgttgagagtatgcagccggccggtgaagggctgctgcaacagaagtacgaacagctcaaagcgaagttgcaggctgaaggtttgttcgatcagcaatacaaaaaaccacttccctcccctgcgcattgcgttggtgtgatcaccagtaaaaccggtgctgcgctacatgatattttgcatgtgttaaaacgtcgcgatccttctctgccggtgatcatctaccctgccgccgttcagggcgatgacgcgccggggcaaattgttcgcgccattgaactggcgaatcagcgcaatgagtgcgacgtattgatcgtcgggcgcggcggcggtagcctggaagatttatggagttttaacgacgaacgcgtagcgcgggcgatttttaccagccgcattccggttgtcagcgccgtcgggcatgagacggatgtgaccattgccgattttgttgccgatctgcgtgcgccaacgccgtctgccgccgctgaagtagtgagccgtaatcagcaagagttactgcgccaggtgcaaagcacccgtcaacggctggagatggcgatggattattatctcgccaaccgcacacgtcgctttacgcaaattcatcaccgattacagcaacagcatccgcagctccggctggcacgccagcaaaccatgcttgagcgcctgcaaaagcgaatgagctttgcgctggaaaatcaacttaagcgtaccgggcaacagcagcagcggttaacacagcggctgaatcagcaaaatccacagccgaagattcatcgcgcgcaaacgcgcattcagcaactggaatatcgtttagcagaaaccctgcgcgcacagcttagcgccacgcgtgaacgtttcggtaatgcagtaacgcacctcgaagccgtaagcccactgagtacgctggcgcgtggatacagcgttactactgctactgacggcaatgtactgaaaaaagtgaagcaagttaaagcgggtgaaatgctaaccacacgtctggaagacggctggatagaaagtgaagtaaaaaacatccagccagtaaaaaaaagccgtaaaaaggtgcattaagccagcacgaattcaacgcgttttttgcttatcaagccatgcccgtgctgacagaagtaatctactgcaccacaggcttttaacacctgcaacggttgatggcagtctggacaaagagctttcatttcaataaattccccgcaggatcggcaacgcgcatggccgttatcctgatcaagcacatgctgacattgtggacaatgcagttccatatgaattcctccggtagccattccctctacattcatagagggaatggcagataaaatacttacggataattatttatttttcttgatgtgcttcatcagacgcttacgtttacgcatctgggttggcgtcagggtgttacgcttattcgcatacgggttttccccttctttgaactgaatacgaatcgggcttcccattacgtccaggcttttgcggaagtagttcatcaagtagcgcttgtaggaatcaggcaggtctttcacctgattaccgtgaatcaccacaatcggcgggttataaccaccggcgtgggcatatttcagcttcacacgacgaccgcgtaccagcggcggttggtgatcttcaacagccatcgtcatgatgcgcgtcagcatagaggtccccacacgacgggtggagctgtcatacgcttcacgtacactttcaaacaagttaccaacaccactgccgtgcaaggcagagataaagtgcacacgagcaaaatcgataaagcccagacggaagtccagcgtttctttcacctgctctttcacttcctgactcaggccatcccacttattcaccacaatgacaagactgcgcccactattgagaataaagcccagcaggctgagatcctgatcggaaataccttcgcgcgcatcaatcactaacatcaccacgttggcgtcttcaatggcctgcaacgttttgattacggagaatttctctacagcatcggtgattttgccgcgtttacgtacgccagcggtgtcaatgagcacatactcacgtccatcgcgttccattgggatgtagatgctgtcacgcgtcgtgccaggcatgtcgtaaacaacaacgcgctcttcaccaagaatacggttagtgagtgtagacttacctacgttcggacgacccacaatcgccagtttgatcggcagactttgcgggtcgaagtcgtcttcctcttcttcttcgccgttctcttccgcttcaaattgcgcccagtattcagcgtcttcgtcgacttcctcttgcggtgcgagatcttccatccacggcagcagcacatgctccagcagacttaatacgccacgaccgtgagacgcggcgatcgggtagatttcacctaaaccaaggctgtagaaatcaaccactgcctgatcgggatccagaccgtcagttttgtttgccaccaggaaggtcggtttttcacgggagcgcagatgtttggcaatcgcttcatctgccggcatcaggcccgcgcgcgcatccaccataaacagtacgacgtccgcttcttcaatcgccagcaggctttgttccgccatgcgggtttctacaccgtcttctgtgccatcaatcccgccggtatcaatacagataaactcacggccttcaatttccgcacgaccgtacttacggtcacgagtcagacccgggaaatccgcaaccagcgcatctcgggtgcgagttagacggttaaataacgtggattttcctacgttagggcgcccgacaagcgcgaccacaggtaccatgtttaaagcctcatttttataaatcatcagacaacgcacgctatattcgcgtcgttgttaaaaacaggaaaacggcccctgtccaggagccgttttcaaagtgaacgacagagacgattaacgtgtaatagagtacacggttccgtcttttgcctggatcagcagtttgccgtcagcggcaaccggttcagtctggaaaccggaactatcaactttttgctgggcaacgaaacgaccatcttcgacgttaatccagtgcagataaccttcactgtcaccgaccaccaggttgccattatacagcaccggagaagtcagcaggcgatgcagcagatcgctttgtgtccacagcgtaacgccgccatcaatggtcaacgccatcacccggtcattttgatcgaccagatagatgcgattgccgtcgacgatgaaatcattcacgctacccagttcgcgtttccacataatctgaccactgcgcagatcaagcgccgtcaggttaccattataggccagcgcgaaaacaacgccgttaacaacgacgggagtcgtgtcaacatcgctcagacggtcaatttcggtagaaccggtcgcctgggaaatacgctgctgccaaatcatctggccctgttccatcagcactgcgctgacgcgaccattatcgccccccacgacggccgcaccaaaagccgttgtcggcgcagactcgccacgcaaagagaggctaggcatatcgaggttaactgtccatttgacagcgccgtcagcttcgttcagcgcttgtaactgaccgttactggtgtggattaacaccagaccgtcgctgaccaccgggcggctaagtgcttcacccgcgactttagtttgccatgccacagtaccatcgctggtattcagcgcgtaaacctgcgccttttcgctgccaatgtagacatgcccaccagacacggtcacaccgccagaaagtaatgcaggctctttagagaaccagccatctttctcggccaggctgacagaccagatttctttgccatcatccgcattcagcgcttttactaaaccagcgcggtccgctgcatagacaacgttgtccgccagtgccggatgaagattggaatagaagttgccaatgccgctaccaacggaagtgctccacgccgtggtcggcgtaaactggttttcaacggttggcaatggggacatctttaccacatcttcttcgctgttaaacaggctacagccgcttaaaagggtaacggaaagcagtcctggcagcagtaatttacgcaattgcatcgggtccctctcagatggacaaattattaattttcatctgcatcatttcgctcagtgccggagtaacatcgcttttcacgcctgcttcccatgcactacgcgcaccttgcttatcacctttgctcagcaatgcttcaccacgcaggtcggcaacaatggcagcccacccttcacctttgatggtatcaagggttttcagcgcggcatcagcctgcttgagctgtacctgaacgcgagcaagacgcagatttatcacggctttgagattttcatcgctcgtgtctgccagcccctgttgtaactgggcggcagctttctctagttcatttttgtcaacaaattgctgcgcaagttccaaagaagccagcgcaccataagtatttttattttcagcagcaaatttttccgccgccgggatgctatccggtttgccttcgctcactgcggtaaccgcattttgataggcaagagaagcggagcgtgcagaatcaacctgatggctgttccagtagcgccagccaatcagtgcgccaacgcccaaaatcaccccaacagccagtgctttgccattttcagcaaaaaagcgtttaaccgcttctacctggtcgttttcgttctcgtaaatttccacgctgtccttctccttccttaacccagtaacgtgcgcaaatgcgcggctacgctatcctgcgcaactgccgtttgctcaccagagcgcaaatccttcactactgctgtgccgttagccacttcagactcacccagcaccacagcaacgcgggcaccccatttatcagcacgggcaaactgtttcttaaagttgccgccgccgtggttggtcatcaatttcacgcccggtaattcatcacgcagacgctcagctaatgccatagccgcagattgtgtatcagcaccactagccaccaggtatatatcgacaacaggatcggctttaaattccggattaacggcctgtactaacaatacaagacgttcgaggcccatagcaaaaccgacagccggtgttgcacgaccgcccagttgttccacaagaccgtcataacgaccgcctgcacacacggtgccctgggagccgagactgttagtcacccactcgaaaacggtacggttgtagtaatccagaccacgcaccagacgctggtttacggtgtaagcgatccccgcgctctccagcagtttgcacagaccggcaaaatgctcacgagattcctcgtccagatagtcacctaatgccggagcgtcgttgagaagcgcctgcacttccggatttttactatccagcacgcgcagcgggttagtgtacatgcggcgtttgcagtcttcgtccagcttttctttatgctgctcaaggaatgccaccagcgcatcgcggtaattggcgcgtgcttccaggctaccgatagagttcagctcaagagttacgtgctcggaaatacccagcgcgcgccaccagcgggcagtgagcataatcagttcagcgtcgatatccggaccttgcagaccgaaaacttcgcagcccaactgatggaactgacgataacgccctttctgcggacgctcgtgacggaacatcggcccgatataccacagacgctgttcctgattgtacagaagaccatgctcgatgccggcgcgtacacagcccgccgtcccttcagggcgcagagtcaggctgtcgccattgcgatcctcaaaggtgtacatctctttttcaaccacgtcggtgacttcaccaatcgcacgtttgaatagcggggtctgctctacaatcggcaagcggatttcactgtaaccgtagctgccgagcacgtttttcagtgtgccttcaatgcgctgccagatggccgtttcgccaggcaggtaatcgttcatgccgcgaatggcttgaatgttttttgccacgtttattctctttctgaatataaaaatgaaccctcaacgcttccctcaatgtttcgggagccatgcgggttcaatcatacacgggaagcgaggcgcttcccatcacgttattatttttcaacctgctgaacgtcaattcgacgcgcttcgtccagctgactggctttcgcacgaatgcgtgcttccagctggtcgatcatatcgttgttgtccagacggtctttgcgcacgccatcttcatagaggccgcttttcttgttgccgccggtgacgccgagtgtagaaaccagcgcctcacctgggccattcaccacgcagccgataatgctaacgtccatcggagtgatgatatcttccaggcgttgctccagcgcgttaaccgtaccgataacatcaaattcctgacggctacaggtcgggcaggcgatgaagttgatccctcggctacggatacgcaggcttttcaaaatatcgaaaccgactttgatctcttcgaccggatcggccgccaggcttacgcgcagcgtgtcgccgatgccttcagacagcagcagacctaaaccaatggcggattttactgccccgctgcgcgcaccaccggcttcggtgatccccagatgcaacggctgatcgatctgttttgccagcaaacgataagactcaacagcgaggaagacgtcagacgctttcacgctgactttgaactgatcgaagttcaggcgatcgagatgatcaacatgacgcatggcagattccagcaacgcctgcggcgtcggttcgccatacttttcttgcagatctttttccaggcttccggcgttaacgccaatacggatcggaatgtttttatcgcgcgcacagtcaaccaccatgcgaatacgctcttcattaccgatattgccagggttaatacgcagacaatcgacgccgtattccgctactttcagcgcaatgcgatagtcgaagtggatgtcagccaccagcggcacgttaacctgctgtttgatgagtttgaacgcttctgccgcgtccatcgtcggtacggatacacggacgatatcagcgccaacgcgttccagcgccttgatttgattgaccgttgcttcgacgtctgtcgtacgcgtattggtcatggactgtacggcgatgggagcaccatcgccaatcggcacattcccaacgtaaatacgtgtactttttctacgttgaattggagcctggttatgcatgaaaaatctcccgcgttacccgtctgttactgcgccggactttgttcggcattgagggtcagacgcgcaacctggttagttctgataaaacgactcagatcgacaggtttcccttgatactggatctgtactgcggctggcgcaccaattttcagtttgtacggtgcctggccggttaagttcaaattaccgtctttacgctgcataccgctaaacaattttttaccggtagcatcagtgacctccagccagcaatcggcagtaaagttcatcaccagcgcattcggatcagccaccggcgtggtcacgccagcctgatcggttggcaacggcgcagcaccatctggcgttgttgctgccgttggtgccggggtcgcggcggtatcaacatttgcctggctagggctaacaaccgcattctgttgcggatcaacagctggtgctggcgcagttacggcaggtgtttgcgtgttggttgcggtagtatccacagacgctggcggcgtggacgttgtagccgggtctgtagttgtgctcgtatttaatggaacactctgcccctgctcgctattactgctcagttccgcgctagattgatcggccatagtggtgatctcttcctgctgagctttgcggtcttgccaccaccaggcaccgctcaggccgataaccacaaacaacaccagccaagtgaaggtcatcagccagccgtcgcgttttttgcggcgtttaccgagggaaaaactctgcatcggcgcaacttttgcagcccgaagtggagcctgcttttccagccctggcagcagttcttcttctggaatatgtaccagacgcgcataagagcggatatatccgcgcaggaatgtactagcaagatcggcgggtgccttatcttcttcaatgtcgcgtaccgtggaaaccttcaggcaaagtcgctcggcaacggcctgctgactaagtcctagttgttcgcgagcattacgcaggcgagcgccggtagtaagtgcttcattttggtcgtgcgtggcttcagtattcattcgctgcaggtacgtttaaatgagaattgagatgccggtgaaccatcatgctcacccacaccgcgaaacatccgttaagttaaccgttatcatacagtataagaccgtctgtgtgctcgtgacaaagcccacattcactaaggctaacttactgttgcatcgttacatactgccttaaagtcagcaaaaacgcaccgttaatattgaccagacaattgcaacttaatacttcattcataaaacattacgccacggtacataaagtaaccgtggcgtaatggctatcagaccgctttaatgtcgatggcttcaccctgcatccgtttacgcagggtacgtttcgtacggtcgataacatcgcccgccaactgaccacaggcagcatcgatatcatcaccacgagttttacgcacaatagtggtgaaaccgtagctcatcagcactttactgaaacggtcgatacggctgttgctgctgcgtccatacggcgcacccgggaacgggttccacgggatcaggttgatcttacacggcgtatctttcagcagttccgccagttggtgcgcgtgttcagtgccgtcgttaacgtggtcaagcatcacgtattcaatagtgactcggccctgattggcgttggatttctccagataacggcgcaccgcagcaaggaacgtttcgatattgtactttttgttgatcggcacaatttcgtcacgaatttcgtcgttcggcgcgtgcagggaaattgccagtgcaacgtcgatcatatcgcccagtttatccagcgccggaactacaccggaagtggaaagcgtgacgcgacgtttagacaggccaaaaccgaaatcatcaagcatgatttccatcgccggaacgacgttgttcaggttgagcagcggctcgcccatgcccatcatcactacgttagtgatcggacgctgaccggtgacttttgctgcgccgacgattttcgccgcacgccacacctggccgataatttcgctcacccgcaggttgcggttaaagccctgctgggcggtggaacagaatttacactccagcgcacaccccacctggctagagacgcagagcgtggcacggtcgtcttccgggatatacaccgtttcgacgcgctgatcgccaacggcgatcgcccatttaatggtgccgtcagaactacgctgttcttcaaccacttccggtgcgcggatttccgccacctctttcagtttgccgcgcaacactttgttgatgtcggtcatctcatcaaagttgtcgcagcaatagtgatacatccacttcatcacctgatcggcgcggaagggtttttcacctaaatctttaaaaaactcccgcatctgctgacggttgagatccagcaggttgatttttccatctttcgtggtgacgttttcaggtgtgactaattgttcagacatatgctattccggcctcgttattacacgttatggcccctggagggttgaaaaaagaaacgccccggtgagcggctgctcgtccgggggcgctgcattgtacaaattctggcgcacggatgccacgtttgcacgcggcatttacgaaattattaacgggtgcgcgggcacacttcgccttcgccaaagaaataagcgatttcgcgagcggcagattcgacggaatcagaaccgtgggtaccgttttcggtcaggctgtcagcgtaatcagcgcgcagagtaccagccagtgcgtttgccggattggtcgcgcccagcagatcgcggtgacgctgaacggcgttttcaccttccagcacggaaaccacgatcgggccagaggtcatgaattcaaccagaccatcaaagaacggttttccatcgtgttcagcataaaagccacgtgcctgttcaacggtcaggtgcagcattttggtgccaacaattttgaaccctgcagcttcaaagcgcgcaaagatattaccaatgacgttttttgctaccgcgttcggtttgatgatggaaaaagtacgttcaatagccatttttacctctgtaaattgttctgttgttgtctgtaccagcgtacgagatggcgcggattataatgagcaacagggccgttgactattgatgaaggtaacatttttttaaaataaaatgagttttagcaacaatcagggacaaaacagattattgcatgacaaatttcactgtcgcgatttgccccacgtcatccatcaccagcaattgataatcacctttatccgtcaaatgcagggtcacgttgcgcccgcgttcagttaacggttcgccattcagaaaccaccagcgttcacctgcccctccactactttgcaacggcaaagtcgcttccgctgcgcccggtaaacgtttaataatcgcgccatcgcgaacgcctgtcagctgcagcgggagctgggcatcgtgaccgtatggcgggcaacttgtgctggccggtggtaagcgcacagcgcgacgttcacttgcgggcagccagggttccagcggtagcggccagacatttatcatttcttgtcgcgcttgcgggcaatcagcggcaacacgtttgccattttcatccagccagatggggaaacgaatgccattaatgccttcctgctccggcagtaatagagttggcggctgactcccgtccagcagccaggttgccaggcggcggcgacagttaccgtcaccttccggcaaagactgtccgcccggccagcagataacgccacgagtgacactgttcgggcgcgggtcttccggcagattcgcactgcggctcagtaagatattattgacctgattcaacaatggtacggcactggcaaagccaaactgaccaacaacgggcgtgccgtccggtctgccagtccagatcccaatgacatagcgagcgttaaccccaatcgcccaggcgtcacgatagccatagctggtgcccgttttccatgccagtggggcgacgcgcggcaaggcactatccggcaagggttgcgcttcatcagccataatccggcgaatgatccacgccgccccgctgctcattaaaggccgttcaagcagcggatcgtcaggctgtaagcgcaatttgcctgccttgccgtggcgagcaaacgcggtatacgctgccgccatatcttccagttttgcaccagcgccgccgagaatgagactaagattcggcgcagcaccgttgggcaaatataacggcaatccaacattgcgtaactttgccgcaaaccgtttcggtccataggcttccagcacctgcacagcaggtaagttcaggctgcgcaccagcgcctcgctcatgctgatcgggccatgaaaaccgctatcaaagttacctggtcgataatcaccggtgcgccgggggacgtcttgcagcagacttgccgggtggatcaagccttcatccagcgccagaccataaacaaacggtttgagcacacttcctgggcttcggatgctattgaccatatcaacatgaccaaagcgactatcatcgttgagatcaacgcttcccacccagccgcgaacacgcatatcggtatgatcaaccacgatcatcgccagactgctgcgcggtggcaaccgccctttccagttttgcgccagttcttccagacgtcgttgaagaccggcatccaacgtagtagtgattttgtcgcttttgcttttaccgagcatcatgcggctaaacagcggtgccagttgcggcatttgtcggggggccagccagatgggttcttccctactctcttttacctgctcacgggaccacacaccttgcacggccatccgttcgagcactttattacgcgcggcttcggcacgctccggccaacgatccgggcgaagacggctgggcgcttgcggcaaaaccgccagcattgccgcctcggaatagcttaaattcgcagggctttttccgagataagcccaacttgccgcaccgatcccctgcaacgtaccgccaaacggagcgcggttaagatacaaggtcagaatttcacgcttagacagatgccattccagttgcaacgcgcgccagagctggcgaattttgccgccaaatgttttggggtgaggatcaagcagacgagcaacctgcatagtgagcgtgctgccaccggaaataacccgtccgctagtgagatcttgccatgctgcgcgcgccacgctgaatggattcacccccggatgcttccagaaccagcgatcttcataattgatcagcgcttcaaggtaacgtggagaaacatcttcgattgttaccggataacgccagatgccgtcagcatcggcgaagcgccagagcggcgtaccatcctgcgccacgaccactcgtgcgggattgacttcatgcagcggtagaggccagagtttatctgctccccacgctgcaagaaaaaggagaaagggcgcggctgccaacgttatccagcagccgcgtttggttaacaagcgaggcatttacggtctgacaatcagcagatcttcagccgcgccggtcgcccgccattggggaacatacatactttccaccatcggttgcggtacctgatacgttcccggcgtcaccgcccgcgccagatacaccagcgttaccggttggtattcatcaacggcaaccgccgccacaaagcgatcgtcacggaactcaatgtgcttaatgctcgcctgctgcatctggttcagtaagttctgcacttcgccaccactttgctccaggctggcgctaccgttcgccagattctggttttccagttccagacccgcaggcagcagatccacgactaacgcatccggcacgctgttactggcttttacctgcaaccacaccagcaccagatcgccgctacgtaagctgtccaggcttttgctcttaccatcagtaccaagaatatgacgctcgatttgcagcacattgttcgccggtaaaggtgcggattgcggataaccgctggcatccatacgcaaccataacggctgatcgccactgttgctcacctgcaaggtgacaagttgatcgctattcagattgctgttttgcgctttctcgcctgtcagctgctcagcactgaaagaggtttgcgcctgccatttaccgggtaaatcctgaatcgtacgggcagccaggaacaacgcgttactttcctgcgtgcttagccagcgttcaccaaacgcctgctggctaagtgtgttcagcaaagtgtactgctcatcgggtagcagtttattttcttccagcaaggagagcattaacgcgttgtcgcgcagactactaccgtaatcacccagccatatccgctcatcactattacgcggcgttttcagcgccagcgcaatcgcttcttcaccacgcgtcgcatcacccatggttttcagcgcaacgccaagttgcagcagcggtaaaccagaagcggcatctgcacgatgctcccagatttcacgcagcgcacccagcggagccttttgctgacgggccaacaccagcgcagcgtaagactgtacggcgaatttactggctttgagattatccgcgtacgggatgctcatcatgcccggatcttgtaaatagcgcagcagacgctcattaccccggttaatggcgtctgtcggcacgctgtaaccctgttcgcctgcgcggaccaggaaatccatcacgtaagccgtcagccagtactcttcgtcaccgtttttatcccacagcgcaaagccgccgttatcacgttgcatttgcagcaaacgggaaatgccgatatcgacgcttgcacggcgtttctcatcactgtcgcctttgatgcccaacgcctgcagttgggctgcgttggtataaagactcggaaacaggccgctggcggtttgctcaagacagccgtacggatacgcttttaactctttgatataacgtgcgatgttcagcggtggtttgccgctcaacaacaattgcccttccagcgtaacagggctgaagttttgcaatccatccgccggaatcgcccatgtctcaccaggctgtaacgccgtaccgtaattaaccgtttgtgccgggaacgccggacggacgccgattttccactgcttatgctgatcggcaacggtttcacccggtaacgctaacccgctaatggtggcctgaatttctccatcgccataacccggcaatgctcgcaccgggataaacagcgtagtacgcacacctggcgctaattcaacggctgcgggactatcgctgaccagttcaagcaaaccactggcggtcagggcaacgttcagtttttgcggtttatcggtaagattagtgatatccagcgtcagacggctggtatcgccactcgccataaagcgcggcatgttcagttcagcaatcaccggtgcggcaactatcactttactttcgttgctaccgaagtcatctgccgtccaggcttgcgccatgacgcgcaattcaccgttaaaatcgccaatcggcagtgtaacgctgccttcgccctgttcgttgagcgttaccggcagcgcctgctgcacgacaatattgacgtgattgaccggcggtttaccaccacgtttcagctcatcaccatcgccaccgaaacgcagagctgccagacgcccctgaccttcaataacctgaccgtaaatatcgtaaatgtctgcgccatagcgtttctgaccaaagaacgcctgccacggatctggcgtgacgtagtcagtaatattcagcacaccactatcaacggcagacaccagcacattcacctgtttaggcttctcgccatttttagtgctggctttaattttcacggttaatggttgattgggacgcatttttgctggtgtttccagcgccagatcgaggcgacggttttcatcgccaagcggcagatgcaacacaccaaccgcgcgttttggcgtcgcggagcgagatttatcgccaggacgtaccaccagcgtacttaaatacagatcatgacgattccaggttttatcgaccggaatcgtcagatccagcccttgagcccgaacatcaatctcttgccaccacagcggcccttcactggactcgaccatcgcataacctttacccgccgttggcgcggcgatatgcaacttaatggtgtcgccagggcgataactggctttatccagtttcagcgtgacacggtcgggtcgcactgcgccgctaccgtcgctgttgtcctgccagctatagccagcccagaaacgaacactactgaccgcttcattcggcgctttgacttccagacgataagcgccccactctaccggaaaactgaccttgccggtttcgtccgctttcagatccagagtttgttcattttcgatcagatctttttgatcaaactgactctgccagccttcatcttcactccagttccagtagtaatcgcggcgttcgcgaatcaggcgcacctgcaagccgctcacggcttttttcacgccttgcgcatcgctataaacgatgtcaaaagcggcgttactgccttcatcaacaatgggctgtttcaccgtgctgtcagtacgataatcgtaaacgcttttgctggcgaactgcggacggatccccggcaatgcatcggcaggccagatagcctgctcagcgcggcgcgtcaccgggcgaccgccgctttccagcaaactaccctggaaaataacctgtaatggggaatgcgtttccttccactggctttctgtagaaacttcgccgcgccctttatcatccagcgtcaactgaacttcatccagcgtgcgggaaagattttcggcagctatatcgccgaattcaaaaccaggtaaggcactcacagcttcacgcagtgggcgcaggaaaagttgcccttgcaaagtattaccattagcaggtgcaccatacaggtagtaccccaccacggagaatttcacttcatctttcggcgttagcggggttttctcaccggtcagattcagcgccatgcgctctggcataaaatcttcgacgtggaaatcccacatccgatactgattatcgcccgtgttagcgcgaatatgccacataccggttgccgcattgctatcgagtggccaggtaaagtggtagaggccattctccggctgactaacgacgctcctgagtacctgcccatcgggtttaatcacgtctaacttgatgggttgattgggcaacgctttaccgtctgcatcacgcagcaaaccattgaggattaccgtttcacctgggcgataaagatcgcgtgggccaaacatgaaaaactgtttgctatagcctggcgcgccagcaatgttaaattctgctaagtccagcgccggaagttttaaatcgagtagcgttgtctgaccgtctttacgcgccaacagtaatgccgcgtttttatcattttccagctgcacatgcccctgagcgtcactggttgcctgagtcagagtctgccctttctcatttaataaagagacttcaattccttgctgggccgcgccgttttccagactttgggtaaagatatccagacgattgtgataacggtgagcactaacgccgatatcacttaacgtaaacagcgtcgcgggattactgtaatcgtaacgtccagcctgattcatcacagccagatacacgcccgcctgctgaagcggtttgatatcgcccagcggcagcaataatttttcacgggtgttacgcgcaggattgagatcaaaccgtccggtgtagaccagatccgccatctgcagcagtttgtcactctgccagttcgccaggctattgcggtattcccattggctaatgaatgctggcagagattctggcttaacgcggaagaagttaacatcgacattattaacgttgagcgccattaccggcagcccttcaacgactttgccaggcagcaggctaccacggctggcaaaaccgacgctgggttggatgtcgcgggtagttatagttttttcgtaatctttactgaaggttgcgttgttgagtgctttgacctccttgccaatagtaacgatcaaatcacgtttcggttcgaggtggcgtaaacgtaactctttaagattatcactcagctcccaggcaccatccactttgccgctttttttatcgacgacatgaataacgcgactgaaatcctgatccgggtcgagagggatggagaacgtcagcaccagcgtggctgcaccatcaagttggacttcagagagatccagcaatgtcagcaccttaccggcactctgttgggccagtttttgtctctccggcacggagagttttgcactactcgcgttttcactagaggccgctttagtaacttcagaaggcgcatcttttttcaccgctgttggcgcgttatcgttgttgtcgcaccctgccagcgccagcattagcatgcaggcggctacgcgtaactttttcatttttcatccctgccacaatggcccgttagcaacgtcgaataattattatgcgtgagaatttacgttatgtaattcagtatcacgcccatacaatccgaattttagtgagaattgtggctcagacagccaaatcagcctcttttgcttgtcgcttttcactaaacatccgacaatttagcctaaccccggcaaaaatggagatgcctatgtccacgacatggtttgtaggagccgactggctcgccgaacatattgatgacccggaaattcagattatcgatgcccgcatggcgagccctggacaggaggatcgtaacgttgctcaggagtatctgaatggacatattcccggcgcagtgttttttgatatcgaagcgctttctgatcacacttccccgcttccgcacatgctgccgcgcccggaaacgttcgccgtggcgatgcgtgaattaggcgttaaccaggataagcacctgattgtctatgacgaaggtaatcttttcagtgccccacgagcatggtggatgctgcgcacctttggtgtagagaaagtgagcattctggggggtggacttgcaggctggcagcgcgatgatctgctgttagaagaaggtgcagtagagctgccggaaggagagtttaacgccgcgtttaatcctgaagccgtggtgaaagtaaccgatgtattattggcaagccatgaaaatacggcgcaaattattgatgcccgcccggctgcacgttttaacgcagaagttgatgaacctcgcccaggtttacgtcgcggacatattcccggagcactgaatgttccgtggacggaactggtgcgcgaaggcgaactaaaaacgaccgatgaactggatgcgatattttttggtcgcggcgtcagctacgacaaaccaattatcgtcagctgcggctctggtgtaacggcagccgtggttttgttagcactcgcgacgctggatgtgccaaacgtgaaactgtacgacggcgcatggagtgaatggggcgcgcgggcagatttaccggttgagccagtgaaataagtattttacaggcaataaaaaaccgccgaatttggcggttttttattgctagtctggttcgcggcctttccagcaggttgacttgtgttacatgagcaacgcaggtgcttcacagcaaaacaatactcaccagtaactctctttttgtcaagcaaaagagagtaattattgtttatttagcgtattatcgacaccggccctttccgccgtgttcggtaataaaataacctggcttattagtccgaattcagacaaatataaataaatcctgctcaaaattaaaaattctaaccggtaaaagatattacttaaacatgtaaattcactttcctttaaaaaacaaaaaaccgccaaaatcaggcggttttttgttgctggtccggttcgcggcctttccagcaggttgtattaccgtagtaatgcaagcgcgtctcagcggagacaatactcgccagtaactctctttttgtcaagcaaaagagagttattattgttctgttagtgtattatccactgcggccctttccgccgtctcgcaaacgggcgctggctttaggaaaggatgttccgtggccgtaaatgcaggtgtttcacagcgcttgctatcgcggcaatatcgccagtggtgctgtcgtgatgcggtcttcgcatggaccgcacaatgaagatacggtgcttttgtatcgtacttattgtttctggtgcgctgttaaccgaggtaaataataaccggagtctctccggcgacaatttactggtggttaacaaccttcagagcagcaagtaagcccgaatgccgccctttgggcggcatattttagattatccgattctgtttaaagtcacgcaaaaaaccaccccagcgacgttcatagaatggcgcaatatgttcggtaataaagtggctaattcctttttccccttttttcacctgacaaatatcgattggttcatcgccaggtaatgtatcggtcgctacacttcccgtcgcctgaataatttcttcgatatcaccatcggcttcaatgccaataagtaaattaggctgtgcctcttcgttctctttaatactacaaataaaagcacgcttcaccggcttaatggttttaaataaggtggtgagactatcaatcatttgtgctggcggctctgcgacttcgcttaatatcaggctttcaccgccttccaggatttcctggctgctcagcggatttccctcttcaccaatcaacaaactgatttcacgcggcataaattctttaccggttggcagtttggcattaaggaagagcgtttcgccaagtgtcatctcaaacagcgtgcgaacgggcattacgacaaatgcctgttcgtcttcaaccgcctgttgaagtgcttctaagctggtgaaaaaaggaatgacgctggtgccgtcttctttttcccagtgctgtaaatcaagcgcgctatcttcaaccacagcctcgccctgcgccgccgtaccaggcacccagacggtggattccagtagagtacggaaaaaggccgggcggtgcgccggttcagttgctgctttttccagcaggtcttcaagttcgttttttgtttcggacataagaaccacaattcattcaacgttcggggcgcaaatgcctgatgcgctacgcttatcaggcctacaagggattcgcaatttgttgaatttgcagaatttgtaggccggataaggcgtttacgccgcatccggcatattagtttacgccgttaacagattagctatcgtgcgcacaccaagtcccgtagcgcccgcagaccactgttcaaccggcgctttacggtaagtcgcgctgcagtcgatatgcagccagccttgctgatagttctcaacaaagtggctcaggaagcccgccgccgtgctcgcgcctgccggatacgccgcgcttccggtattgttcagttcggcaaagttagacggcagctggctgcggtggaactccgccagcggcagacgccagaacggttcgttctcctgcgcggcactcgccagcaagcgaccggccagcgcatcgtcaaaactgaacagcgcgtgataatcattacccagcgcagttttcgccgccccggtgagggtcgccgcatcaatgatcatttccggtttctgcgcactggcatcaatcagaccatcggcaagcaccagacgcccttcggcatcagtgttcatcacttcaacttttttaccgttgcgataggtgatgatatcgcccagcttgaacgcattgccgctaatcaggttatccgcacagcagaggaacagcttcacgcgcttgttcagtccgcgcgtaatggcaaatgccagcgccccggtaaccgttgccgcgccgcccatgtcgctcttcatgctgtccataaacgcagtctgtttgatgctgtagccgccggagtcaaaagtgatacctttacctaccaggcacgcgtacactggcgcttctttatcgccagttgggttgtaatccagcgccagcaataccggagaacgttcactaccgcgtccgactgtgtgcagccccatataaccttgctcacgcagatcttcgcctttggtgatccgataagtcacacgatcgcccgcgacgttgctgatcagatcaacagcacgctgtgccagttggcttggtcccaattcttctgccggtgcgttgatggtgtcacgcacccagtcgatgatcatcaggcggttatccagttcctggcgctgggcatcgtccagatccggccacaccactttacgcgtgcctttcggggctttgtaaccttgccagaatgcccagcagcgatccgcatcccagccttcaccgcttaactgaacatgcttgatgcccagaccgtcaatcttgcgcgccgcacgctggatcagccccagatcgtctgccccgttcaaatgcagggtaatgccgtcattattaatgctgtaagttgctttttctccccagcgcgcgtcggcaggttgggtagagagggtaatcttcatcgcttctgtcattttagttatccttctttgtaaaagggccgccagttggcagccccaggatttttccgctaaatgattcgcgttgcaggaaggcggcaagtgagtgaagccccaggagcatagataactatgtgactggggtgaacgagcgcagccaacgcatctgcggcgtgaagcatgacgcggaaattattcggcctcgtccagccagactaacaaaatcgcttcgaggattttctcgttggatgcctgcgggtcgtcgtcgaaatcttccagatcgcaaatccactgatgcatatcggtgaatcgaaccgttttcggatcaagatcgggatacgcatcgtacagtgcttcgccaatttcgcggctatcggtccacttaagtcccatactaacctctgttaatgctcacgcgcatggttgatagtgtaacgcgggatttcgactactaaatcttcgtcggtaacgcgcgcctggcagcttaaacggctttccggctccagtccccaggctttgtccagcatgtcgtcttcctgctcactgctttccggcagactgtcaaaaccttcacgaacgatgcagtggcaggtggtgcaagcacaggatttttcacaggcgtgttcaatctcgataccgttacgcagagctgcgtcgagaatggtttcaccgctattagcttccagaacagcgccatcagggcagagatcctgatgaggcaaaataacaatctttggcatattaaacctcgtccacggaatggcctttcagcgcacgacgaacgctctggtccatgcggcgagcggcgaaatcctgggtttgtttgtctacgtttttaatcgcttgttcgatggcgtcaacatcatcgccctgcgccacttcactcaggtgagcggcagcatcgtcaatgacctgacgttctgcggcgcttaacagcgcggcatcagcagccagcgcgccgtgcagactttccagcacacgcgccgcttctactttttgttctgccagcattcgggcttttacgtcctgctcggcatagctcatactgtctttgatcatgctagcgatttcgctatcggtcagaccgtaagacggtttgacctgaatagacgcctcaacgccggtggatttctccatcgccgtcacgctcaaaagaccgtcggcatcgacctggaacgtcacgcgaatatgcgcaccgccagccggtagcgccggaataccacgcagcgcaaaacgcgccagactgcggcagtcctgcaccagttcgcgctcaccctgcattacatggatagacatcgccgtctgaccatctttaaaggtggtgaaatcctgagcgcgggccaccggaatagtggtattacgcggaatcactttctccaccaggccgcccatcgtttcgaggcccaggctcagtgggatcacatcaagcaacagcatttcgctgtctggcttgttacccaccagaatatccgcctgaatcgccgcgccaatagcgacgactttatccgggtcgatggaagtcagcggtggacgaccgaaaaattcgcctacccgttcacgcaccagcggcacgcgagtagaaccgcccaccatcaccacttccagcacttcatcagcttctacacccgcgtctttcagcgcgcgacgacaagccagtaaggttcgttttaccagtggcgcgatcagttcattgaattgttcacggctgatttcgccctgccagcccgcaacgttaacggtcacggagtccgcatcgctcagcgcgattttggctgcaatggcggcatccagcagttcacgctgaacgcggttatcgctacgatcaggaatgcccgcctgctcgcgaatgtaatccgccagcagatggtcgaaatcatcgccgccgagcgcggaatcaccgccggttgccagcacttcaaacacgccgcgacttaagcgcagaatggaaatatcaaacgtcccgccaccgaggtcataaacggcgatcacgccttcctgaccggaatccagcccgtaggcgatagccgcagcggtcggttcgttaagtaagcgcaggacgtgaaggcccgccagacgcgccgcgtctttggtgccctgacgctgggcatcgtcaaagtacgccggaacggtgataactacaccatccagctcgcctgccagggcttcagttgcccgcgccgccagtgctttgaggatgtccgcagaaacgcgcaccgggttcagcagccccgccgccgtttcaatcatcggcaggccgttttcgctggcctggaattgataaggcagatgcggatagcgttgctggatatcagccaggctgcgtcccatcaggcgtttaacagaactaattgtgttggcggtatcgagcgctgcattagtacgcgcgtcataacccacgctatgcccttgctgttgatagtgaacaacagatggcagcaggtgacggccttcatgatcggctaacgtttcggcctgaccgctgcgcactgtcgccaccaggctgttggttgtgcccaggtcaataccggccgccagacgacgctgatgcggcgcagcactcaaaccaggttcactaatttgtaataaggccatgtttagcttccagaaattaaaaatcgagcagtttttcttcgagttgttcggcactgcttcgcagtttatcgagaaaacgcagcttacgcacggtatccgccgccgcgtcccacgtctcgttgtctaactgttcaaccatcaactgatggcgggtatcaaacatctttttcacacgtttgataaagctttccagccgcgcttcatctttcgcctgttcgatctcgtccagctcttcgcgcagctccaactgttccatcaggaacgcggtgtcgcgcacagtatgctgctcgctggcgagatcaaagccgtgcaaagaaagcaaatattccgcgcgcattaacggatgacgcagcgtttgccaggcctggttaatggttgcagattgctgtacggcggcgagttgttccgcctggcttccgctggcgaatttatcaggatgatactgacgttgtagatcctgaaaacgcaggctcagcgcctgggtatcgagttgatagcgggcaggcaagccaaagagggtgaagtaatccataacattctcagggctgcgatccgccgcgataacggcgaatcaggtaaaacaaaccccacgcgcaggcgaccacggtggggttatcggtatgcgcatcaaacgtggaagctttcgccgcaaccacactcatctttgacgttcgggttggtgaatttaaacccttcgttcaggccttcttttacgaagtccagctgcgtaccgtccagaaattgcaggctcttgccatcgaccacgactttcacgcctttgtcttcaaacacgatgtcttccggcgtcggttcgtcaacaaattccagtacataagccataccactacacccggaggttctcacgcccagacgcaggccaaaccctttaccgcggttagccagaaaggtatttactcgcgctgctgcactgtcgctcagtgtaatgctcataaccaaacctcaactcttattttgcttcacgtttgcttttatagtccgcaatggcggctttgatcgcgtcttctgccagaatagaacagtgaattttcaccggcggcagttcaagttcttcagcaatatcggtgtttttgatcgcctgcgcttcgtcgagagacttccctttcacccattcggtgaccagggagctggaagcgatagcggaaccgcagccgtaagttttaaaacgcgcgtcttcaatgataccttcatcgttgactttaatctgcaacttcatcacgtcgccacaggccggtgcccccaccatgccgctgccgacgttctcgtcgttgttgtcaaaggaacccacgttacgcggattctcgtaatggtcgataactttttcgctgtaagccattataaattctcctgattccgataccgattaatgatgagcccattcgatgctgttcagatccacgccctgcttgtacatttcccacagcggagaaaggtcacgcagacgaccgatggatttacgaactaactcgatggtgtagtcgatctcttcttcagtagtaaaacgacctaaagagaaacggatagagctatgtgccagctcgtcgttcagccccagcgcgcgcagcacgtaggacggttcgaggcttgcactcgtacaggcggaaccactagaaactgcgaggtctttcagcgccataatcaggctctcaccttcaacgtagttgaagctgacgttgagaatgttcggcgcaccgtgttccaggtcaccgttcaggtaaacttcttcgatatctttgatgccgttccacagacggttacgcaggccgcgcagacgttccatctcggtcgccatctcttcttttgcgatgcgataggcctcgcccattccgacgatctggtgaacaggcagagtgccggaacgcataccgcgctcgtgaccgccgccgtgcatttgcgcttcgatgcgtacgcgcggtttacgacgtacatacagcgcaccgatacctttcgggccatagattttgtgaccggagaaagacatcaggtcaactttcaactggctcaggtcgataggcagtttacccacgctctgggttgcatcaacgtgatagataatgccacgagcacggcacatttcgccgatagccgcgatatcctgcaccacgccgatttcgttatttacgtgcatgatggacacgaggatggtgtcgtcacgcatcgctgcttcaagttctttcaggtcgataatgccgttacgctgcggtgccaggtaggtgacttcaaaaccttcgcgctccagctgacggcaggtatccagtaccgctttgtgttcggttttgctggtgatgatgtgcttgccttttttctgataaaagttggctgcacctttgatcgccaggttgtcagattcggttgcaccagaggtaaagacgatttcacgcggatcagcgccgaccagatcggcaatctgattacgggcgatatctaccgcttcttcagcctgccagccgaaacggtgagaacgggaggccgggttaccaaaggttccgtccatcgtcataaactgcatcattttctcggcaacacgcgggtccaccggcgtggttgcggagtagtcgagataaatcggtaatttcattgctctataaactccgtacatcactcaatgcaaggaatcaggctaccggctggatgtacgaccgtgtttacggagtatttagcactccggcctgattctgaattctttttattaagcgcgtaacttaacgtcgatcgcgtcttgtgtgcgggtgcgtggcgcgtcgtgagtatgctgacgaccagacacatccagcacttcctggttattaaccagttcgcctaaagtaatgttgttgagaaaaccggtgagacggtcgctcaaatcacgccacagcgcgtgggtcaggcatttatcgccgccctggcagccgcctttaccctgacaacgggtggcatctacagattcgtcaacggcgctaattacttcgccaacggcgatgctgctggcatctttgcctaacagataaccaccgcctggtccacgtacgctggaaaccagaccatttttacgcagacgggaaaacagttgttccagataagaaagggaaattccctgacgttcggaaatatcagccaacggtaccgggcccgcttcagagttgagcgcaacgtcaagcattgcggtcacggcatagcgccctttagatgtcagtctcatgtcttacttcacctcaaactcgcccctgcccggggttttttattgtaaaagtgggggtattgcatagcagggtcaagtctgacattcccgagtaaattggtcaactatttacttgactgatttagtcgggtatttaaccttcagtgccatttttttatcgtggcgtttgtacctgttgtcggatgcggcgtgaacgccatatccgccctggggttctgtacactgtaggcctgataagacgcattacgcgtcgcatcaggcaacggctgtcggatgcggcgtgaacgccttatccgacctacggttctgttcactgtaggcctgataagacgcattacgcgtcgcatcaggcaacggctgtcggatgcggcgtgaacgccttatccgacctacggttctgttcactgtaggcctgataagacgcattacgcgtcgcatcaggcaacggctgttattcggccttgttacctttattctgctgctcaatagaagccagaatcccgcgcaggatattcaactcctggctttccgggcgcgcacgggtaaacagacggcgcaatttattcatcacctgccccggatggttttcacggataaaaccggttgccagcagcgtttgttccagatgaccataaaaacgctccagatcatcgaccagcggatacggcgtctcttcatgctcgacctgctcgccgttttcctgagttgccagccaggccatgcgcacttcataggcaataacctgaaccgccatcgccaggttcaggctgctgtattccgggttagccgcaatcgcgacatgataatggcatttctgcaactcttcattggtcaagccgacgcgctcgcgaccaaacaccagcgccaccggggtatttgccgcttcagcgacgcttttcaggccgcattcgcgcgggtcgagcatcggccatggcagcgtgcgggaacgtgcgctggtgcccaccaccaggctacaaccggctaacgcttcgtcgagcgtatcgacgatgtgagcattaccaatcacatcgctggcccctgctgccagggcaatcgcctgggagtcgggtttcaccagtggattaaccagccacagattggttaatcccattgttttcatggcacgggcaacagaacccatattgccggtgtgactcgtctccaccagcacaattcgaatattttgcagcattgtctttcttcatctaaagattattcacgcatcttatcataaaacgaagacagatgccgatctcgctgctatactctgcgccgttttcccgttctttaacatccagtgagagagaccgatgcatccgatgctgaacatcgccgtgcgcgcagcgcgcaaggcgggtaatttaattgccaaaaactatgaaaccccggacgctgtagaagcgagccagaaaggcagtaacgatttcgtgaccaacgtagataaagctgccgaagcggtgattatcgacacgattcgtaaatcttacccacagcacaccatcatcaccgaagaaagcggtgaacttgaaggtactgatcaggatgttcaatgggttatcgatccactggatggcactaccaactttatcaaacgtctgccgcacttcgcggtatctatcgctgttcgtatcaaaggccgcaccgaagttgctgtggtatacgatcctatgcgtaacgaactgttcaccgccactcgcggtcagggcgcacagctgaacggctaccgactgcgcggcagcaccgctcgcgatctcgacggtactattctggcgaccggcttcccgttcaaagcaaaacagtacgccactacctacatcaacatcgtcggcaaactgttcaacgaatgtgcagacttccgtcgtaccggttctgcggcgctggatctggcttacgtcgctgcgggtcgtgttgacggtttctttgaaatcggtctgcgcccgtgggacttcgccgcaggcgagctgctggttcgtgaagcgggcggcatcgtcagcgacttcaccggtggtcataactacatgctgaccggtaacatcgttgctggtaacccgcgcgttgttaaagccatgctggcgaacatgcgtgacgagttaagcgacgctctgaagcgttaatgactcaggcgggtgatatcactcacccgccctcgcctttcaggcgctattccgaaatacttcctcactgctttactttctttcgtcactctcccaccatctttccccgattaatggatgataaagaagagccaaggaaaggttatggcactgccagtgaacaaacgcgttcccaaaattctgtttattctctttgttgttgccttctgcgtttatttagtgccgcgcgttgccatcaacttcttctattatcccgacgataaaatttacggtcccgatccctggagcgcggaatccgtcgaatttacggctaaggacggtactcgtctgcaaggctggtttatcccttctagcacgggccctgctgacaacgccatcgcaaccatcattcatgctcacggcaatgccggaaatatgtccgcccactggccgctggtcagttggttacccgagcgtaatttcaacgtttttatgtttgattatcgcgggtttggtaaaagtaaaggcacgccgtcccaggccggattgctggacgatacgcaaagtgccatcaatgtggtgcgccatcgcagtgatgtaaacccacaacgtctggtgctgttcgggcagagtattggcggggcgaatattctggatgttattggtcggggtgatcgtgaaggcatacgtgcggtgatcctcgactccacatttgcctcttatgcaaccatcgccaaccaaatgatccccggcagtggctacttacttgatgagagttacagcggcgaaaattatatcgccagcgtcagcccgatcccgcttttactcattcacggtaaagctgatcacgttatcccatggcagcacagcgaaaagttgtatagcctggcaaaagagccaaaacggttgatcctaatcccggatggcgaacacattgatgctttttccgatcgtcacggcgatgtttatcgcgaacagatggtggactttatccttagcgcgttgaatccgcagaactaacccatgatcgctagcacgataatcattcacaaaaccaccttaagacatgctaatccactggtcagaacagtttaagatgagaaaaattctgtgacgcttgccaacatttctgatgattagcattcccttcgccatttccttgagcaaactttagctattcttatcaattatgcttatgggagatctacagatgatgcctacgcttgctccaccatctgtccttagcgctccccagcgccgctgccagatcttgctgacgctctttcagccggggttgaccgccaccatggcaaccttcagcgagcttaatggtgtggatgatgatattgccagtcttgatatcagcgaaacaggacgggagatcctgcgctatcatcaactcacactgacgactggttatgacggtagctaccgggttgaaggtacagtgcttaaccaacgtttgtgtttatttcactggctacgacgtggtttccgtctgtgtccgagttttattaccagccaattcacccccgccctgaagagtgaactgaagcggcgcggaattgcgcgtaacttttacgacgataccaatctacaagcgttagtgaatctctgctcccgacggctgcaaaaacgctttgaaagccgcgatattcatttcctgtgtctgtatctgcaatattgtttgctgcagcaccacgctggaattacgcctcagtttaatccgctccaacgtcgctgggcggaatcctgccttgaatttcaggtagcgcaggaaattggacgccactggcagcgtcgggcgctccagcctgtaccacctgatgagccactgtttatggcactacttttttccatgttgcgggttcccgatccattgcgggatgcgcatcagcgggacagacaattgcgtcagtctatcaaacgtctggtaaaccattttcgtgagctgggaaatgttcgtttttatgatgaacaggggttatgtgatcagctttatacccacctcgcccaggcgttaaatcgcagtttgtttgccatcggtattgataataccctgccggaagagttcgccagactgtacccacgcctggtgcgcaccacccgcgcggcgctggccggatttgaaagtgaatacggcgtccatctttctgatgaggaaagtggtctggtcgcggtgattttcggtgcctggctaatgcaggaaaacgatctgcatgaaaaacagattattcttcttaccgggaatgatagcgagcgagaagcgcagattgagcagcagttacgcgaactaacgttactgccgctcaacattaagcatatgagcgtaaaggcatttttgcagacaggcgctccgcgtggcgcggcactgattattgcgccttataccatgccattaccgctctttagtccaccgctgatctatacggacctgacgctgacaacacatcaacaggagcagatccgcaaaatgctcgaaagtgcatgatcagcaactgggaacaactttcgggcgcaaaaacattgccggaagcgccaccagcgccattacccagaacacgccgtggcccagatattgatacaggaaaccggcgaaaacggtcatgatagcgatactgccgcccatcgcgacggcagagtaaaccgcctgtaaacggatgacttcgctaccctggcgagcagcaatataacgcatggcggccaggtggcagaccgtgaaggtgccgcaatgcagaatttgcaccactatcaaccacggcaacgccgtagttgctcccataatgccccagcgcactacgccgcaaatcgcgctgatcaacagcatatcgcgtgcactacaacggcggaaaagtttattactcagcgcaaagataatgacttccgccaccacgcccaggctccacaaataccccaccgcgctggcgctgtagccagctgcctgccagtaaatggcgctaaaaccgtaataggccgcatgtgccccctgcaataaacaaacgcaggccagaaagcgccagttctggcgaaccagcgccaaccacgcagaccaaccggtgctctcctgctggcgacttgccccttgtggctgaatcgtcggacggatgagaaagccgagcagcatggatgccacgcccaacgtcaacagcgcgaggatcacccgataatcaaacatagtgaccagtttgcccgtcagcgcgctgccaatgacaaacgccacgctgccccacagtcgcactttgccgtaatcaagcgggaactgcttttgccacgtattcgccagtgcatcggtcaacggtaccagtggactgaaaaagaggttaaagccaatcatcaccagcatcagccacgctacgtgcgcccccgcccagaaggcgacagcaaagagaagtgtcagcagtgccagcacgcgcaaggcggaaatcaggcgggaaggatcgctgacgcggggcgcgatgagcaaactcccgaggaaacgggcaaccagacctgcccccaataacaggccgatggtttctggcgttaaaccaatccctttaagccagacgctccagaaaggtagaaaaatgccgtaactaaaaaagtatgtgaaatagccgagcgccaaccagcgcgtggattgcaaaaccatgagtccctcccgtcaggaggcgttagtctggggttaatcgaatgttggtgcaagttgaaaaataagaatattcgagcctgcttcccgatgtctgtaacgccagttcacaagcactaaaaaactgagatccgcgacgcatgttgcaaaaataatgcgtaattatgccgttacgcttgccaaacgttcctgcacaatggcgatgaaatcgcgtaatgccggcttcatctcccctttcttccacgccatcagtaaagcaatggaaggcacatttccggcaatgggacgaaaaacaacctgtccggtattaaaattattcatataaccgggtatcaaagtgacgcccagccccatgcccaccagattcatggtcaccagaatattcgttgccacctggacgatatttggctggctgttttcttgcgcaaaccacgctttaacgatcggcgcaaggctaccggaatacaccggatcggtactgacgaaattcacgccatccagttgcgcggcggtgatctctttttcatgtgctaaagggtgatcaaccggtaacacaaccactaatggttcgtcaaaaagctccagataatcaatctccgggctataaacaggatggcgcattaagccgacgtcgagttcaccacggcgaattttttcctcctgttgcgtggtgattaaactcaccagctcaatcaaggtgtctggctgtctgagacgaaacatcggtaatacttttggcagtaaattcacttccgcgcttggcacaaagccaatggttaattgtctgtcttcctgaacaattttccgcgcccgtaatttggcattttccgcttgttcgaggattgccagcgcgtcctggagaaaacattctcccgccgccgtcaacgcgactttgcgcttatccctcaccagtaacggaacaccgacacagttttcaagatcgcggatctggctgcttaagctaggctgactggtatgcagtttttccgccgcacgggtaaagttcagtgcctgcgccactgcgacgaaatagcgtaaatgccgtagttccatcaccttccccttgttatcgaaaaaacgtctcagctggtagaaattaactatttcacatattagcaaccaaccagcaacatccttatggcacaaaaatagaaggtcaatacatcttatctttcaggattaaaaaatatgaccacacccagtgatttgaacatttaccaactgattgacacccaaaatggtcgggtcactccgcgtatttataccgacccggatatttaccaactggagcttgagcgtattttcggtcgttgctggctatttctcgcccacgaaagccagatcccaaaacccggtgatttctttaacacctacatgggagaagatgcggttgtcgtagtgcgtcagaaagacggcagcatcaaggcgtttctcaaccaatgccgccaccgggccatgcgtgtgagttatgcagattgcggcaacactcgcgcctttacctgcccgtatcacggctggtcttatggcattaacggcgagttgatcgatgtaccgctggaacctcgcgcctacccacaagggttgtgtaaatcccactggggactaaacgaagttccttgtgtggagagttataaagggctaatttttggcaactgggataccagcgcaccgggcctgcgtgattacctgggtgacattgcctggtatctggatggcatgctggatcgtcgcgaaggcggcaccgaaattgtcggcggcgtacaaaagtgggtgatcaactgtaactggaaattcccggcagagcagttcgccagtgaccagtatcatgctctgttcagccatgcttctgccgttcaggtattaggggcgaaagatgatggcagcgataagcgcctcggtgatggacaaaccgcccgcccggtgtgggaaaccgccaaagatgcgctgcaatttggtcaggacggtcacggtagcggtttcttctttactgaaaaaccggatgctaatgtctgggtcgatggcgcagttagtagctattaccgcgaaacctatgccgaagcagaacaacgtttaggtgaagttcgcgccctgcgcctggcgggtcataacaatattttccccacgcttagttggctaaacggcactgccacactccgcgtctggcatccgcgcggccctgatcaagttgaagtgtgggcgttctgtattactgacaaagccgcctccgatgaagttaaagccgcttttgaaaacagcgccactcgtgcttttggtcctgctggttttctcgagcaggatgacagcgagaactggtgtgaaatccagaaattgcttaaaggccaccgcgcccgcaacagcaaactgtgtctggaaatggggcttggtcaggaaaagcgccgcgacgacggcattcctggcattactaactatatctttagtgaaactgccgctcgtggaatgtaccaacgctgggccgatcttctgagtagcgaaagctggcaggaagtgctcgataaaaccgccgcttaccagcaggaggtgatgaaatgagtgcgcaagttagtctagagttacatcaccgcattagccagtttctctttcacgaagccagcttactggacgactggaaatttcgtgactggctggcgcagctcgacgaagagattcgttacaccatgcgcaccacagttaacgcgcaaacacgcgaccgccgcaaaggcgtccagccaccgacaacctggatttttaatgacaccaaagaccagctggagcggcgaatcgcccgtctggaaacgggcatggcctgggcagaagagccgccgagtcgcacccgtcacttaatcagcaactgccagataagcgaaaccgacatcccaaacgtatttgctgtgcgggtaaattatctgctttatcgggcacaaaaagagcgcgatgaaacattctatgttggaacgcgtttcgacaaagttcgccgtctggaagatgacaactggcgcttgctggaacgggatatcgtcctggatcaagcggtaatcacttcccataacctgagtgtactgttctgatgaatcgaatttatgcgtgtcccgttgcggatgtgccggagggtgaggctctccggatcgataccagccccgtcatcgccctgttcaacgttggcggcgagttttatgccattaacgatcgttgcagccatggtaatgcgagtatgagtgaagggtatctggaagatgacgccacggtggagtgcccgctacacgccgccagtttttgcctgaaaacggggaaagcgttatgcctgcccgccaccgatccgctcaccacttatccagtacacgttgaaggtggtgacattttcatcgacttaccggaggcgcagccatgagcgatctgcataacgagtccatttttattaccggcggcggaagcggattagggctggcgctggtcgagcgatttatcgaagaaggcgcgcaggttgccacgctggaactgagcgcggcaaaagtcgccagtctgcgtcagcgatttggcgaacatattctggcggtggaaggtaacgtgacctgttatgccgattatcaacgcgcggtcgatcagatcctgactcgttccggcaagctggattgttttatcggcaatgcaggcatctgggatcacaatgccagtctggttaatactcccgcagagacgctcgaaaccggcttccacgagctgtttaacgtcaatgttctcggttacctgctgggcgcaaaagcctgcgctccggcgttaatcgccagtgaaggcagcatgattttcacactgagtaatgccgcctggtatcctggcggcggtggcccgctgtacaccgccagtaaacatgccgcaaccggacttattcgccaactggcttatgaactggcaccgaaagtgcgggtgaatggcgtcggcccgtgtggtatggccagcgacctgcgcggcccacaggcgctcgggcaaagtgaaaccagcataatgcagtctctgacgccggagaaaattgccgccattttaccgctgcaatttttcccgcaaccggcggattttacggggccgtatgtgatgttgacaagccggcgcaataatcgcgcattaagcggtgtgatgatcaacgctgatgcgggtttagcgattcgcggcattcgccacgtagcggctgggctggatctttaaggaagcacgatgaaagaaaaaacgatcattattgtcggtggcgggcaagcggcggcaatggctgcggccagcctacgccagcaagggttcaccggtgagctgcatctgttttccgatgagcgacatcttccttatgaacgacctccactcagcaaatccatgttgctggaagattccccgcagttacagcaggtgttacccgctaactggtggcaggaaaacaatgttcatctgcattccggtgtaaccatcaaaacgctgggtcgcgacacacgagagttagtgttaaccaacggcgaaagctggcactgggatcagctttttatagcaaccggcgcggcagctcgaccgctgccgttgcttgatgcactgggagaacgctgctttaccctacgccatgccggtgatgccgccagactgcgagaagttctgcagcccgaacggagtgtcgtgattatcggtgccggaactattggtctggaactggctgccagcgccacgcagcgcagatgtaaggtgacagtgattgaactggcggcaaccgtcatgggccgtaatgcaccaccgcccgtgcaacgctatcttttacagcgccaccagcaggctggtgtgcgcattctgctcaataatgccattgaacatgtggtcgatggtgaaaaagtagaactgacgctgcaaagtggggaaacgcttcaggctgatgtggtgatttacggtattggtatcagcgccaacgagcaactggctcgcgaggccaaccttgatactgccaatggcattgtcattgatgaggcttgccgcacctgcgatcccgcgatctttgccggtggcgatgtggcaatcactcgtcttgataatggtgcactacaccgctgcgaaagctgggaaaacgccaataaccaggcgcaaattgccgctgccgcaatgttagggctaccgctaccgctactgccgccgccgtggttctggagcgatcagtacagtgataacttacagtttattggcgatatgcgtggcgatgactggctttgtcgtggcaacccggaaactcagaaggcgatttggtttaatctgcaaaacggcgtgcttatcggtgcggtcacgctgaatcaggggcgtgagattcgcccaattcgcaaatggatccagagcggcaaaacgtttgatgcgaaactgctgatagatgagaacatcgcgcttaaaagtctgtaaccaggataattagcgaatatctcaatgcctggggcgtggcgaggtgcaagagtgtgtattacgtttaaaagtcattatcttgcaaagggattggttatgaacacactacgttattttgattttggagctgcccgccccgttttgttattaattgcccgtatcgccgtggtcttaattttcattatttttggttttcccaaaatgatgggctttgacggtacggtccaatatatggccagcttgggcgcgccaatgccgatgctggcagcgattattgcggtagttatggaagtgcccgccgcgatattaatcgtgcttggctttttcacccgtccgctggcggtgctgtttattttctacacgctgggtacggcggtgattggtcaccattactgggatatgaccggcgatgcggttgggccaaatatgattaatttctggaagaatgtcagtatcgctggcgcgttcttgctattggcaattaccgggccgggggcaatttctctcgatcggcgttaagaaagatgccggatgcggcgtgaacgccttatccggcatttaataaattacagccactctacccgcaagctcatctcactagttgtactttcccctggtgctagcgcaatgagatcacccccttccgggcgatgatgatcatccggcgcatggctcatcggttccagacagaagaaatcaaacgcatatcctttatcaaacgcagggtcggaaacaaagatgaaataacacggtgcaggtggcgtcgtttccatgatgatggcataaccttcctgcggctgctcgatgcgggcctgaccattccatccggcaaaaccattgttcacccactggcgcggcaacggcgcgggctggttaaaatccagttcctgcggtagctgctcgcaaaactcacccgccagccactgctcccgctccagccagtaaccgctcgcctgtgcctgaatccgcgtttgcgggctcaacggaaaataaggatgccagccggtaccaaatggcagcgtctctgccccttgattggtgacagagagcgtcaccgtcagcgtatccgccgttaaatgaaacgcctgacttacccgatagtgatagacaccgctgcgatgttcatacaccagacacaaactatcatcgctgtggctgacacattgccactcgcccagccagccatcgccgtgtagatagtgcgcatcccactcaacattcggttgcagttgatactcacgcccctgccagacaaaacgattgccgctcacccggtttgcaaatggcaccagcggaaaacaactggcatcggttgccacaccgctttttttaccaggacgtaagagcggcgtcgtatcgcgccagaagccttcgattacgccgccctggtcagaaacgtccagctttaggctcccgtgggataaggtatagatggtcatccgctaactccttaatccgggaagttaatcacaactttcccgcatttgccgctcgccatcagcgcataggcatcacctgcctgttccaggctgaagcgatgggtaatggcgttacgcggccacagcttccagtccgtcagatcatgggcgcatttttccatatggaacagactggtcacccaggagccgataatccgccgttgatggtgcatcagatcggcgctgacctcgaattccacttttccggtttcaccaatgtaaaccacccgtccccagtcagcggtggattgcagtgccagcaagcgacctgcggcattaccggaacaatcgagcgcaacatccgcgccaccgtgggtgagttcggcgataatctgcggcagaccttcggtggttgctaaatagccgtgatccatcacccctaactgttttgccatcgccagacgttccggcagcatatcaacgccgatgatccgttttgcaccgcgacctttcgccagcatcatcgccatcatgccgactggccccagaccgaccaccagcacgttatcactgccggaaacttcgccgcgcaaaattccttcatacgctgtaccaacgccgcaactgataaacgcaccatcttcgtagctcagcgcatccggcaggaggatcagatctttttcttccgccagcaagtattcggcatgaccgccgtcacgctgccagccgtaagccgcttttccttcgccagtacaagaaataggaaaaccgcgacggcagttcgggcaaaaaccacagccagaaatgtgatacaccagcacgcggtcgccctctttaaaatggcggcagccttgccccatcgccacaatctgcccgcacggttcatgaccgttgataaagccctggtataacggtttatcgggtgccgccgctgtggcacggtgttgatgatagatatagtggacatcgcttccgcaaatcccggaggatttcattttgatcagtacctggttaatccccggcgtcggcaccgcaacttcccgcagatcgacggtgctatttcctggtaaataagctgccagcatcgttttcataaatccctcattaacaatacgattaattttcatccctgccgcacccgcgccaggggcgttaaggtttagcgtttcgctttactgcttcgctgggtcagcaagatattcgccagcaccgccaccacgatgatgacgccgcgtaccacctgctggaaaaaggagttaataccgagcagcaccagaccgttaccgattagcgtaatcaccagcacaccaagcaatgtaccgaacagggaaccgcgaccgccggaaagtgccgtaccgccgaccacgaccgcggcgatgacgtcaaactccagaccgtttgcggcacctgcgttaccagaaccgaggcgcgccgccaacaaaatgccggtcaccgccgctaataatccgctaagggtaaagataagaatgcgcacccgacgaacgttgatgccgcacaactgcgccgccgtagcattaccgccaacggcaaaaacgctgcgcccgaaggcggttttgcggctgatgaacacaaacagcgcaaacaacacaatcatgatcagcgcggataccggcacaccgagaaattgtccgcccagccagtccagcacctcgttttcatcaatcggcactggcagtgcgttcgtcataaacagccccattccgcgcagggcgctccacagccccagtgtggcaacgaaacttggtacattaaacacgccgcgcagcaccccggccagcgttcccatcagcgcgcctaacagcaacaccagcaggcacgccaccgccagcggaacttcaaattgcagcaaaaatgccaggcacacgctgacaaaagccaccatcggcccaacgctgacatcaatttcaccggagataataatcagcgtcatcgcccaggcggcaatcccaatggtggcggcatcgcgcagcacgttcatctggttattcaaactgataaagccaggcgcgttcagggagaagaccagataaagaatggcaatcaccaccagcaaaccgatctcattaatatggcgactgacaaattgtttgaggctgacgctcttgccctgcggcaatggtaaactgctagcagacatcttcaggttcctcggtaaaattcatcagtgcacagacagaatggcggacatcagctcatccacattgaccggagcgtgaaactcctggctgaacgtgccgtgctgtaataacaggatgcggtcacacaccagcggcaactcctccacttcactggagataaacaccacgctttttccttcggcagccagctcacggacaatacggtaaatctgctgtttggcttcgatatcgacgccgcgcgttggctcgtcgagcaacaaaatctggctggcagcatagacccaacgaccgatcaccactttttgctgattgccaccagaaagcgtgccgatgggtgtttcgctactggcggccttgaccgtcatccgctgcatcacctcttcggtcaggcggcggatggtggaccattgcagcacaccgttggcgctgattttttgccgattggtcagcactgtattttcgtcaacgcccaaccagggaatgatccccgcttctttgcggttttctggcgtatagccaatgccgcgtttcagcatgtcgccgtaatcggggcgcgtgattttctcgccgttgataacaatttcgccctgttcatactcctccagcccaacaatcgccttcagcaattcactgcgccctgcccccagcagaccagcaatgccgagcacttcgccacgacgtagcgtaaaactgatatcctccagcttgggcttatggcgtaacgcacggacttccagcacggcctgatccacaatttcctgaggggctaccggcgcaatatcaacgtgatcgcgcccgagcatcaggctcacaatatgatgcgtggaggtgttttcgagcatcacatcgcccgccacctgaccatcgcgcataacggtggcacaggaggcaatgcggcgaatttcttccatccggtggctgacataaatcaccgccacgcccagtgcgctcatctttttcaccgcgctgatcaccagttcaacttccgcactcgcaaggctactggtaggttcatcaagaatgaccacgcgcggctcgcccttcatcacccgcgcaatttccaccagctgcttttgcgccgggcttagcgtactaacaagttgttcaggactaacgtcaacgcccagcgcctgtaagcaacgttgggcatcctgcgccatttgcaggtaatcaatcatgccgttgcggcggggccactgaccgaggcagaggttttccgccactgtcagcccttccaccagacttaactcctgataaaccgcgcgcacccccagttcagcggcacggcgagtcagcgtagcttcgtcaccttccagtcgcgtctcgccaatccagatatcaccgctatccgggcgttcgctgccggtaagcattcgaatgagagtgcttttgcccgcgccgtttttacctaacagcgcacgaacttcgcctttattgagcgtgaagttaacgttatccagcgcaacgacgccgggataacgcttatttcctgccaccacttttgctaccgggactgcctctgttgccgtgaacatagggacctctgcgaatcagcgattagggcagaccatcaacgtgcgttgccagccactgtttaccgtcttccgttttggtatagagatcgataggcacctgaatcactttttcaccgtcggcttgtttattgataaccttcaatgtttgcgcgaaaacagcattgcccattttcttaccggaaatatccactaccgctttcagcacctgattgttttccagctcctgagcaatttcggttgtcatatcgctaccgaaaacagcaatttttccggcctgattttgattacgtaccgcttttaccgcgccgagtgtcgcaccgccgctttcccccataatggcgttgagatccggcgtggagataattagtttttcaccaacggaaatcgctttatctaaaacagtcccttcctgattagcgacaatttgcgcgccgggaacgcgggattttaaaacttcttcaaatcctttacgtcgctgcacacaaacttcaaaggcttcgcaattgatgacggcaattttcggctggtcaattttattggcaataaaataatcagcggcagcgttacccagttttttaccaaattccagcggatcgccgaccagatacgcgctgacatatttatcgacccccttttgattaatacaggtgttgtagcaaatcaccggaatgcccgcttcactggcgcgacgaacggtacggctactgccattttcagacactgcgcttaaaataatggcatcgacattacgcgccacgagggtatcaacaaaggtactttctttgctaatatcaccctgggcgttagtttctattaactgaacttgtacactggaatcttttgccgcatcctgaacgccctgacgcactccagcgtagtatccctgagtatcaaggtatattgcgccaatggtcatttctttttccgcagccctggcaaatagtgcgctacctaatagcgtagccattaataatagattacgggttgttctcatttttgtaggcatagagcctcctgtagggtttttattaacaacggcttattctaattattttgtgatgagcggcagcgcgtgccgctcaaatattacagttaatagggtttagtgaacgcggttaaaaataaaaggcatcacggtggtgaataatgccgctttcggccaagccggattaatcgccgtcaattcagcgcgagcagactcatattgcgcaacctccccgagtcccgcggacgccagcatcgccaccatcaggcatttttctttatgctgctgttgtaaatcgccatacaggctcaacaagtcaggttggctgacggcaaagaaatccgcttcgatactggttttcgccatctcttgcgcccactgtttcatttcactaaacagttgctgtgcggtttgttgttcgcccagcagtcgcagcgccatcccttgccagaagagataatcaaccggctgatcgttgtaataactgtgaatgttaatagtgcgatcgccggtcgccgccagacgtaaacaacgcgtcgcttcagtttcatcgccctgcgcgttggcgcatatcgcctgccagaaccagatgtcgttatcagtttgccccggtaaacggccttcgcttaaattctccggataatgcagcgcggcatgaagcagttcgcaggcctgctgcggctgtctggcatcaagatgctgccaggcgcgtaataactggttgaggataaactgactggtgaccttcccttccccgccttcccacgggtggaatttgcgcgtggcgagaatgtccgccgctttgtctgcctgacccgtgagatgccacaaattgagcagttctgcggtcatgtcgtcgcgtttcagcgcaatttccagattattttccagacgcgccagtcgtttctccggtgtggctccacttaacttatccagcaaatcccgttcgaaaagcagacgtgcatcctgcggcgcaagctgataagcattatcaagataacgcgcggccagctcataatcgtgttgcttattccacgcatggatcgctaacccgcgccagccgtcggcaaactccgggctcatctctacgcaacgttgccaaaaggcaatggctttgttgtagctacgtttgttgtagtagaagcaagctagtaaatggcgagcaaaccagcactcttcaatactctccagcgccgccacttcttccagcgtattcgggaaacggacaaactgcgggaagacatcaatggcttttgcgaccagttcgccacgttcggctttcggcagcaagctggcttgcaggtaaagcggcagcgtgcgctggcagtccagtgcgttcagcatctctgccgccagggtgggcattccccagttaatcagttgcccggcggtcatcagggcgttaacgtcgcgtccctgacacagaccgcgccactgcgcgagagcactttcgctacgaccatcgaaccagttcagccaccacagagtggcgttcagcggataatcgcgcagcagtttctcgcgctgcacacgcgcgttgtcctgacgaccacttaacaccagcagcagattatgcaggcaaagcacttcctgattggttgggcaggcgcgaagactttgttggcaaaaatccagaccagcgtcgaagttaccattacgcgccgccagtcgtgccaggccataatagccaccggctttgctgttgccgctccagaccgcacgccagaaatcctcttcggcttgttgatattgtccctgacgttcgtaagcactggcgcgaatcaaactcgcctgtccgcactgcggatttttgttcagcgcatgtgcgcgtttcagagcctgagtggcatacgccaccgcttgcgggaaatctgcgcggttatattccagcatcgccagcgccaggttacagcgataatccagcgggtccagcgccacgccgcgcaggtagtaatcgaacggactacggctggcgtgatgatattgctccagatgctgaccgataaaccaggcttcatctgtactggtaatgtcttgtgctgccagtggcgctttggcgacgtccggtaacggcaacgcttgcggctgatgttcctgataactcagtacaatattgccgtcggcatcggagagctcaatggtcagcctttcaggattgataccgtgcaacacgccctggatggcggtcgcaggcatcagtgccacggcatcatcaagtaacgcgttgcatttaccgatttcgcggatcgccaggcggtatccgttcaacggagagatggcatacagcccccactcaatcccccgcttactacgctggagttttatcaccgcatcgcgggaggcattttgcaccatgcccaaagaatgataaggcaggaaatactgctcaaaacgcttctcttcgtaagcatcaagccaggtaaaatcgggctggttatcggcaaaaataccggtcatcagttcgatatacgggccgttattgtcggtcagactcttatcccacgcctggccaaattcactgtgtccccaactccactgttttttacctggcgcaatatggtggttggcaacgtgcagcaaaccgccatcttcatcgtgacaccacgcgccgacaaaatcgtactggcttttttcggccatataactggttggaacaggcacatttttatagcgagaaatgtccactccagcggagtagtccactttgtagtaagtgccggtagcgatggggaaagcggagacggcccgtttgccgtgatcaaacaccgccgttacatccggcgggaagacgctctgatgcccttccccccctttcactgccgggttggcccaccacaagaaatgacgcggcgtggcgttcccgttatagacgcggctggcgatttccagcgccgcccggtcagggcgcagggtgaaacctgtcatcacctgtaaaccatgcatcggctccgtttcgcctacccacaccgtctgtgcaccgtcttcatgggcttcgagggtgaaatcaacgggcataaaggtggtcgggcgatgatgttgcggccagttaaactcaatcccaccggaaatccacggccccagcagccccaccagcgcaggtttaatgacttcattgtgataaacaaaatcgcgctgtttcactttatcccacgcgcgatgcacccgaccgcccagttccggcaggatcatcactttgatgtagtcgttttccagccacaccgcctgccaggatttcagggttttctgctcgctcagcgtatcggtcacgccgtagggataaaccgcgccggagcttccctgataaacgcgattttccaggaacatgggatgtatatcctgcggcccggtttcataggtcgggatctcaacgcgctcttgccacacttttactggagtcatggtgccctcaatattaacaagacatactgaattaaaagatttgtggcagtgtattgaacaatctggcaatgttttcgcggaataatcacgcaattaactaaacaaggtttagtgaagatgagagcctgcattaataatcaacagattcgccaccataacaaatgcgtgattctggaactgctgtaccggcaaaagcgcgccaataaaagtacgctggcccggctggcgcaaattagcattccggcagtcagtaatattttgcaggaactggaaagcgaaaaacgggtggtgaatattgacgatgaaagccagacgcgcgggcatagtagcggtacatggctgattgcgccggaaggtgactggacgctgtgcctgaacgtgacgcccaccagtattgagtgtcaggttgctaatgcttgtttaagtccgaaaggtgaatttgagtatttacagattgatgcaccgacgccgcaggcgctgctgtccgaaatcgaaaaatgctggcatcgccaccgtaaattgtggccggaccataccatcaacctggcgttggcaatccacggtcaggttgatcctgtgaccggcgtgagccaaaccatgccgcaagcgccgtggacaacgccggtggaggtgaaatatctgctggaagagaagctcggcattcgggtgatggtcgataatgactgcgtgatgctggcgctggcggagaaatggcaaaataatagccaggaacgggatttctgcgtgatcaacgttgattacggcattggcagcagcttcgtgattaacgagcaaatttatcgcggcagtttgtatggtagcggacagattggtcacaccatcgttaatccggatggcgtcgtctgcgactgtggacgttatggctgcctggaaactgtcgccagcttaagcgcattaaaaaaacaggcgcgggtatggctaaaaagtcaaccggttagtactcaacttgatcctgaaaaactgactacagcgcagttaatcgctgcctggcaaagtggagaaccgtggatcaccagctgggttgatcgctctgccaatgccattggtttgagtctgtataacttcctcaacatcctcaatattaatcagatttggttgtacggtcgcagttgtgcctttggtgagaactggcttaatactattattcgccagacaggatttaacccgttcgaccgcgacgaaggaccgagcgtgaaagcgacgcaaattggctttgggcaattaagccgcgcacaacaggtgctgggaattggctatttgtatgttgaggcgcagttacgacagatttgatggcgcgataacgtagaaaggcttcccgaaggaagccttgatgatcataaacgaaaaattgcctgatgcgctacgcttatcaggcctacacggagattgcaatatattgaatttgcaaagttttgtaggccggataaggcgttcacgccgcatccggcatgaacaacgagcacattgacagcaaatcaccgtttcgcttatgcgtaaaccgggtaacgtgcgcagatgtcgagaactttacctttgatgcgctcgataacggcttcatcattgatgctgtccagcacgtcacacatccagccagccagttctttcgcttcggcttctttaaagccgcgacgggtaatcgccggagtacctacacgaataccggaggtcacaaacgggctcttcggatcgttcggtacgctgtttttgttgacggtgatgttagcacggcccagagcggcgtctgcttctttaccggtcaggtttttatcaaccagatcaaccaggaacaggtggttatcagtgccgccggaaaccactttgtagccgcgctcgaggaacacttctaccatcgctttagcgtttttagcgacctgctgctggtaagttttgaactcaggctccatcgcttctttcagagcaaccgctttaccggcgattacgtgcatcaacggaccgccctgaccaccagggaaaacggcagagttcagttttttgtacagctcttcgctaccacctttcgccaggatcaggccgccgcgcggacccgccagggttttgtgagtggtggtagtaacaacgtgagcatgaggaaccgggttcgggtagacgccagcagcaaccaggcccgcaacgtgcgccatatcaacgaacaggtaagcaccgatgctgtcagcgatttcacgcattttcgcccagtccaccacgccggaatatgcagagaaaccaccgataatcattttcggcttgtgttctttggcttgtttttccagatcggcgtagtcgatatgaccggtagcatcgataccgtaaggaacgatgttgtacagtttaccggagaagttaaccggagaaccgtgagtcaggtgaccgccatgcgccaggttcatacccagaacggtatcacctggttccagcagcgcggtgtagaccgcaaagttagcctgggagccggagtgcggctggacgttagcgtagtcagcgccgaacagttctttcgcacgatcgatcgccagttgttcaacgatatcaacatactcgcaaccgccgtagtagcgtttgcccggataaccttcagcatatttgttggtcagctgagaaccctgcgcctgcattacgcgcgggctggtgtagttttcggaggcgatcagttcgatgtgctcttcctgacgtactttttcctgctccatagcctgccacagttcggcatcataatcggcaatgttcatttcacgctttaacatccgcatctcctgactcagctaacaataaaatttttggcctttataggcggtcctgttggacaacggcgaacagtataaccgaatcattgtgcgataacaggtcttgacaaaggaatttacgcaaacgattaccttcaggctacgcaaggctttggagaataaagagcttgcaaccggaaacggatttcttttcaggtttgtgatgcaaatttttcacttcatcacattctttctgaaaaacaccaaagaaccatttacattgcagggctattttttataagatgcatttgagatacatcaattaagatgcaaaaaaaggaagaccatatgcttgacgctcaaaccatcgctacagtaaaagccaccatccctttactggtggaaacggggccaaagttaaccgcccatttctacgaccgtatgtttactcataacccagaactcaaagaaatttttaacatgagtaaccagcgtaatggcgatcaacgtgaagccctgtttaacgctattgccgcctacgccagtaatattgaaaacctgcctgcgctgctgccagcggtagaaaaaatcgcgcagaagcacaccagcttccagatcaaaccggaacagtacaacatcgtcggtgaacacctgttggcaacgctggacgaaatgttcagcccggggcaggaagtgctggacgcgtggggtaaagcctatggtgtactggctaatgtatttatcaatcgcgaggcggaaatctataacgaaaacgccagcaaagccggtggttgggaaggtactcgcgatttccgcattgtggctaaaacaccgcgcagcgcgcttatcaccagcttcgaactggagccggtcgacggtggcgcagtggcagaataccgtccggggcaatatctcggcgtctggctgaagccggaaggtttcccacatcaggaaattcgtcagtactctttgactcgcaaaccggatggcaaaggctatcgtattgcggtgaaacgcgaagagggtgggcaggtatccaactggttgcacaatcacgccaatgttggcgatgtcgtgaaactggtcgctccggcaggtgatttctttatggctgtcgcagatgacacaccagtgacgttaatctctgccggtgttggtcaaacgccaatgctggcaatgctcgacacgctggcaaaagcaggccacacagcacaagtgaactggttccatgcggcagaaaatggcgatgttcacgcctttgccgatgaagttaaggaactggggcagagtctgccgcgctttaccgcgcacacctggtatcgtcagccgagcgaagccgatcgcgctaaaggtcagtttgatagcgaaggtctgatggatttgagcaaactggaaggtgcgttcagcgatccgacaatgcagttctatctctgcggcccggttggcttcatgcagtttaccgcgaaacagttagtggatctgggcgtgaagcaggaaaacattcattacgaatgctttggcccgcataaggtgctgtaatttgatgttgccggatggaaacatccggcaacccttgacgcggtttaaattgccgcgtcgtcctcttcaccggtacggatgcgaatgacccgtgccacgtcaaagacgaagattttaccgtcaccgattttgccggtttgcgccgtgcgaataatggtatcgacacaggtatcgacaatgtcgtccggtacgacaatctcaattttcactttcggcagaaaatccaccatatactccgcgccgcggtacagctcggtatggcctttctggcgaccaaagcctttcacttcggtcaccgtcatgccggtaataccgacttcggccagtgcttcgcggacatcgtccagcttgaagggttttataatcgcatcaatctttttcatgctattccttgaaaaggtcgcctgtcttttgatctgctaaacgtaacacataacgccaattcattccttgaaatcgtttgcatccagctcgtgtcgggaaagcagtttataaaattctgtccggttgcgccccgccattctcgccgcgtgggtgacgttgcctttggtgatttgcagcagcttacgcaaatagttgagttcaaactgattacgtgcctcaacaaaggttggcagcgccgtattttcaccctccagcgcctgctccaccagcgcatcactaatcaccggagaactggtcagcgccacgcactgttcaatcacgttgaccaactggcgcacattacccggccagctcgcggtcatcaggcgtttcatcgcatcggtagagaacgcgcggacaaacggtttatgtcgctctgccgcctggcgcaacaggtgatttgccagtagcggaatgtcttctgtgcgctccgccagtgccggaattttcaggctgacaacgttgaggcggtaatagagatcttcgcggaattccccgcgcgccatcgcttttggcagatcacggtgagtggcagaaataatccgcacattgatatcaatatcgcggttactgcccagcgggcgcactttacgctcctgcaacacgcgcagcagtttgacctgtaacggcgcaggcatatcgccaatttcatcgagaaatagcgttccgccttccgccgcctggaataaaccttcgcgattgctgacagcgccagtaaacgcgccacgcgcatgaccaaacagctcgctctccagcaattgctcgggcaatgcgccacagttaatagcaataaatggtttgctgttgcgcgggctggcgttgtggatagcctgggcgaaaatctctttcccggtgccgctctgaccgttaatcaaaacgctgacgtcactttgcgccaccagccgcgcctgttccagcaaacgcagcatcagcgggctgcgggtgacaattgcctcgcgccagcgttcatcggtggctggcgcggattgctccagcgcatcgtcaattgcctgatatagcgcgtctttgtcgacaggcttggtgaggaaactaaaaacgccctgctgtgttgcagcaacggcatcgggaatagaaccatgcgcggtaagaataattaccggcattcccggctgcactttctggatttcagcaaacagctgcataccgtccatttcatccatccgcaggtcgctgatgactaaatctactttttcgcgattcagtacccgtaatccttcagcgccactttccgccgtgaccacactgtagccttcgctggtcaggcgcaggccaagcagtttcagcaatcccggatcgtcatcgaccaataataaatgcgcaggtttatggctcatcaggagtgacctcatgggtggatggcgcgggcttttcactctcgtgcggcgtatccgggctgaaatttccagccggtttgcgggtgctgagctggcgttcaatatcggtcaggttttccagcttgcgggtggtgagttccagttgctgctgtagaacgtgatgttgctggcgcaatgtatccagctcgctgtcgctggactgctggagtttactgtaacgttggcgctcttccgccagttgcagttgcagcgcctgaccatcgcgccagagttgatacagtgggcgaacctgtgccgggatctcggtacttaacgcttcaatacgcgcgaccagctggcggcgctcatacggcgtaattttggcgtcggcgagcaaaatcccttgtttaaaggtattttgccagctgccgtcgtcatattggcgagcttgctgacggctctgcgcaggcattaaacgatcagcacaatccatcgcccgcagccagtaaagcggattggtttcggtacttttaccttgcagcgcccagatgtcgctacattcagtagaaagatagtcagccagttgataaaccggaattttttcttctgctggcgtatcaatggctggcttattgtgattctgcacgcaacccagcaatgccagacatggcagccctgccagccacagccgtcggggcaataatcgttgaaaaatgtgtcgcatattcaccagacttaaagcctatcccagtgggcgtaattgttgcagacagtctggacatggacagcgcggagaaaccggagcgtacatatcgtacgtgaagatttcgagcactgcccggggccgaactgacaaataaaatagcctgataggataggctgttagcattatttcgtgtttttgctgctcggtaattcaatgcggaaacaaacgtcttgcccgctctcgtcgaccagatacagttccccttgcatacggcgaatacaatccctggcaatgcttaatcccagaccgctgcccttcaccgccccttttcgctggtggcttccctgaaaaaagggttcgaagatcatggcgcgttcctcttgcggaatgggcgtgcctgtattgatgacatcaatataaacccgcgcaccatgtaaactgctgcgaaggcaaatgttaccggattcagccccgtagtgcaccgcattggagtaaagattatccagtacgctcatcagcagcattggctccgccaggcaagctgttgctttgagatcgacgtcggtatgcatcattttagcccgtgcgggcaggctatgagcagaaaccactgtctccaccagcggtgctaactcaacattctccagttccaccgcactgtccgcctgtttacggttgtaatcaagcagttgttcgatcagtttttgcaaattgcggctgctgctatcaagaatgctcaccacctctttttgctctggcgtaagcggcccgacaacctggtcagccagtaattcagtgccctcgcgcatactcgccagtggcgtttttaattcatgagataaatgtcttaaaaattgatggcgttgggattccagccaactcaggcgctcacttaaccaaagaatacgttgcccaacgctgcgtaactcgctcggtccactgaagctgacgctattgcccagagaacgcccttcccccagacggttgatcatgcgctcgatatttttcaccggcccgataatcatccgcgtgaaaagcagtaccattaccagactcaccagaaatagcaccaggctttgccaaccaaaatattgcccacgttcggcgatttcacgctgaagctgctgcccacgagagaacaccactgtgcgcgtggcctgtaccatttcggtattggcactggcaaaggcttcaagacgtgcggcggcggcagcatcgggaccgctgttgttacactgaagttgagccagattgtgcaaatcctgacgtaatgcctggtagagtttatcgtccggcagcacgcctgcgtgggcatcgagcatttcgctgtaacgcttgcgctggctttgataaaccttcgccagggttgggtcgtccagcacgcaatactgacggtaactacgctccatctccagcgccgcgttggtcatcgcttcactgcgccgggcatcaataagcgtagtgcggttaaccagcgccgcctgatcgctaagcgcattcaggctttgccaggcttgccatgccagcaccaacaggggcagcagaatcagcaaaaatgccagcattaccagttgtcgtaaactgcggggaaaaacgggccagcgtttcaaggtgttactctcgtcagacgcgaatagcctgatgctaaccgaggggaagttcagatacaacaaagccgggaattacccggctttgttatggaataaggcggtgcctaactcgacgtttcgcccgatggttgatatagctacgctgatatcagaagttggacggcaggcaccttgttgtgcgtcattcgtattttatgtagcacgtcccgaaggggctgacataagtcggtgaatgagccactggttactattatgcagtaactgtgccaataaagaaaatagtttggtaacgtactgattatacgttgctttgaggggtttatgtctcctccgctgtttgaatgtaaatcagccactgtgtcgctaaaaagagacaacttaagataaacttattagataatattaaaatcaatgagttaagtgtcgccagaaagcgacacggcaaaccacccattgtcgtgatttacagacacaaaaaagctcccggagttgggagcttatgatagtggttggtgcttaatgccgcatccgggctgcaaaaccaatgggctgacgacttaccccaactgcttacgcgcattgcggaaaatgcgcatccatgggccatcctcgccccagttttccggatgccaggagttgctgacagtacggaaaacacgttccgggtgcggcatcataatggtgactcgaccactttcagtcgtgactgccgtaataccgttcggactaccgttcgggttagccgggtaggtttcagtgactttgccgaagttatcgacatagcgcagtgccaccagccctttgctttccagtgccgccagatgcgccgcatcacgcacttccacgcgcccttcaccatgagagacagcaatcggcatttggctgcccaccatcccctgcaacagcagagacgggctttgggttacttcaaccaggctgaaacgcgcttcaaagcgatcggaggtattgcgcacaaaacgtggccacaactcactacctgggatcagttcacgcagattagacatcatctggcaaccgttacatacccccagcgccagcgtttgcggacggtggaagaaggttgcaaactcatcgcgtacacggtcattgaacaggatactcttcgcccaaccttcaccggcacccagcacatcaccgtaggagaaaccaccgcacgcgaccagggcgtggaaatcttccaggcccgtgcgtccggtcagcaggtcactcatatgcacgtcgatagcatcaaagcctgcacggtggaaagctgccgccatttcaacatggctgttcacgccctgctcacgcagtacggcaactttcggacgtgcgccagtggcaatatacggtgctgccacatcttcgttgatatcgaagctcagttttacattcaggcccggatcggcgtcgttagatttcgcctgatgctcctgatcggcacactccgggttgtcacgcaggcgctgcatctgccaggtagtttctgcccaccagacacgcaacgtggtgcggctttcgctgaatacagtctgcccgttggcggtaatcacaaaacggtcaccggaaaccgcctgccctacataatggacacaatcagcaagcccatgctgtgccagtacggactcgaccgcttcacggtcagcggcacgaacctgaatcaccgcacccagttcttcgttaaacaacgccgccaggcgatcgtcacccagagtggcgatatccgcgtcaatgccacaatgaccagcaaaggccatttccgccagcgttaccagcaggccgccatcagagcggtcgtgatacgccagcagcttacgctgtgcaaccagcgcctgaatcgcgtcatagaagcctttcagttgcgcgacatcgcgtacatctgccggtttgtcgccaagctgacgataaacctgcgccagcgccgttgcgcccagcgcgttattgcctttgcccaaatcaatcagcagcagtgcgttatcttcggtagaaagctgcggcgtgatggtgtgacgtacatcttccacgcgggcaaatgcagaaatcaccaggctcagcgggctcgtcatttcgcgctcttcgttaccttcctgccagcgggttttcatgctcatggagtctttacccaccgggatcgtcaggcccagcgccggacaaagctcttcgcccacggctttaacggcttcatacaggcccgcatcttcaccagggtggcctgccgccgccatccagttggcggaaagtttgatgcgtttgatatcgccaatttgtgttgcggcgatgttggttaacgcttcaccgaccgccagacgggcagaggcggcgaaatccagcagcgcaaccggcgcacgctcgccaatcgccatcgcttcaccgtagtagctgtcgaggctggcggtagtgaccgcgcagttagcgaccggcacctgccacggccccaccatctgatcgcgcgctaccatgccggttacgctgcggtcgccaatggtcaccaggaaggttttttccgccacagtcggcagatgcagcacacgtttcaccgcgtctgcaatggtgatcccttcacgggccagcgcgtcgcctttcgctttcagcgtttgtacatcgcgggtcatcttcggcgttttaccaagcaggacgtccagcggcagatcgatcggctgattatcaaaatgacgatcgtgcagagaaagatgcagttcttcggtcgcttcaccaatcaccgcgtagggtgcgcgctcacgcttacacagttcgtcaaacagcggtaattgatcggcagcaaccgccagcacgtagcgttcctgggattcgttacaccagatttccagcgggctcatgcccggttcgtcgcttagaatctcgcgcagttcaaatttaccgccgcgcccgccgtcgctcaccagttccggcatggcgttagaaagaccgccagcgccaacgtcgtggataaacaggattgggttggcatcaccaagctgccagcaacggtcgatcacttcctggcagcgacgctccatctccgggttgtcgcgctgtacggaagcaaagtcgaggtcggcatcagactgaccagacgccatagaagacgctgcaccaccgccaagaccgatgttcattgccgggccgccgagaacgaccagcttcgcaccgacgttgatctcgcctttttgtacgtgatcggcgcgaatgttgccgatcccgcccgccagcatgatcggtttgtgataaccgcgcagctcttcgccgttgtggctgttcactttttcttcataagtacggaagtagccgttcagtgccggacgaccaaattcgttgttaaacgccgcgccgcccagcgggccttcggtcatgatgtccagcgcggtgacaatgcgctcaggcttaccgaaatcttcttcccacggctgttcgaagccaggaattcgcaggttggaaacggagaaaccaaccagacccgctttcggctttgcgccgcgcccggtggcaccttcatcgcggatttcaccgccggaaccggtcgccgcgcccggccacggagaaatcgccgtcgggtggttgtgagtttcgactttcatcagaatatgcgccggttcctgatggaaatcgtagcggcccgtttcgtggtcagcaaagtagcggcccacttcagaaccttccattacggcggcgttatctttataagcagagagaacgtgatctggcgtggtttcgaaagtatttttgatcatcttgaacaggcttttcggctgctgttcaccatcgataacccagtcggcgttaaaaattttgtggcggcagtgctcggagttcgcctgggcaaacatatacagttcgatgtcgttcgggttacgaccaagctttgtgaaagcatcctgcagatagtcaatttcatcttccgccagagccaagccaagacgcaggttagcgtcgatcagcgcctgacggccctgccccagcaaatcaacgctggtaaccggagtcggttgatggtgggcaaacaactgctctgcatcatctaaagcaaaaaagaccgtttccatcatgcggtcgtgcagttcagcggtaacctgctgccattgttcattggtcagcgtaccggcttctatatagtaagcaacgccgcgctcaaggcggtttacctgttgtagcccgcagttatgggcaatatcggtcgctttgctagaccagggagagatggtgccaggacgcggggtcaccagcaggagtttgccttgcggggcgtggctggcgagtgccgggccatatttcagcaggcgttcaagttgtgcgtgctcatcatcgtttaacggcgcattgaggtcagcaaaatggacatactcggcgtaaatattgtgaaccgggagcctggcagcctgaaaacgtgccagcagtttgttgattcggaatgcgctcagtgcagggctaccacgcagaatttccatcataagtctctcgtcttctaagctttcggtgtacccaagggggggaaacgggcgtcattataaagaatctgatgcgctgacgaaaccgtttgcgtggaaataaaatcaccatcgtgaattagcaacgcgtgccgccaatggctgtaataagttgccatctggcgcaggtttacgcaaaatgccgctcatttatgagtaaacctttcactattattacgttttttcaagctgggacgcgcacgacacagagaattaactaattgaaaaaattaaagattaattatctgttcatcggcattctggcactgctgctcgcggtcgctctctggccatccattccctggtttggtaaagccgacaaccgtatcgccgccattcaagcgcggggagagttgcgtgtgagcaccattcatactcccctgacttataacgaaatcaacgggaaaccttttggcctggattacgaactggcgaaacagtttgccgattacctcggcgtaaaactgaaagtgaccgtgcggcagaatatcagccagctgtttgacgaccttgataatggtaacgccgacctgctggcggcaggacttgtctataacagtgagcgggtaaaaaattatcagcctggccctacctattattccgtgagtcaacaactggtttataaagtgggtcagtatcgcccacgtacgctgggcaacctgacggcggagcaactcaccgttgcaccgggtcatgtggtggttaacgatctccagaccctgaaagaaacaaaattcccggaattaagctggaaggtagacgacaaaaaaggctctgcggaattaatggaagatgtcatcgaaggaaaactcgattacaccattgctgattctgtcgccatcagcctgtttcagcgcgttcacccggagctcgccgtagcgctcgatatcaccgatgaacaaccggtgacttggtttagcccgttagatggcgataataccctttccgccgccctgctcgacttcttcaacgaaatgaatgaagacggtacgctggcacgcattgaagagaaatacctggggcatggcgatgattttgattacgtcgatacgcgcacatttttacgcgccgtcgatgcggtactgccgcagttaaagcccctgtttgagaaatacgccgaagaaattgactggcgtttgctggccgctattgcttatcaggaaagccactgggatgcacaggccactagtccgacgggtgtgcgcggcatgatgatgttaaccaaaaataccgcgcaaagcctcggcattacggatcgtaccgatgccgaacagagcatcagcggtggcgtgcgttatttgcaggatatgatgagtaaagtgccggaaagtgtgccggagaacgagcggatctggtttgccctcgctgcgtacaatatgggctatgcgcatatgctggatgcccgcgccctgacggcaaaaaccaaagggaatcctgacagttgggctgacgcaaaacagcgtctgcctttacttagccagaaaccctattacagcaagctgacttacggctacgctcgtggacatgaagcctacgcttatgtcgaaaatattcgtaagtatcagattagcctggtgggttatctgcaagagaaagagaagcaggctacagaagcggcgatgcaactggcgcaggattatccggcggtaagccctacggagttgggcaaagagaaatttccttttctcagctttctttcccagagcagtagtaactatttgacccattctccctctctgctgttttccaggaaagggagtgaagagaaacaaaattaatccgtgctggattgcgcttttttctgcgctttaatttcctggcggcgcatgcgaaagaagtcactgagcaacgccgcgcactcatccgccagtattccttccgtaatttccactcggtgattcatacccggatgatgcagcacatccattaaagatcccgcagcgccagttttcgcgtcacgcgcaccaaagaccacgcgaccaatgcgactgtggatcatcgctccggcacacattacacatggttcaagcgtgacatacaacgtggcgtcgatcagacgataattttgcatcaccagaccaccctgccgcagggccatgatttctgcatgtgcggtgggatcatggcgaccaatcgggcggttccagccttcgccgattacccgattgttatgcactaataccgcgccgaccggcacttcccgctcatcccaggcacgtttcgccagcgtcagcgcgtgacgcatccagtattcgtggctaaattcgacttcagacaaaaagaaaactccggttataaaagcgcggcgcattatacacggacgctatgctttactttattccagttgctggagttcaccgcgcggggttactcgccaacgatgctgacagaaataaagcagcggattgtcctgattactgtcgctatagccactgtacagccgcagcggagtgccgattttgcgctccagttgtgcgaccttttcatgtcccagacaacgcatcgtcaatacccaaccaccatagccacgctgaatttggctggcgataagattaacccgcggcagccagggcgtatcgaaataaaccgcttcaaccagcggctgcggagagccggtaatcaaccagatatcagcatcggaacttaacaggtaggtggttaatcgctcctgaaccagcggaaaggcggtaacattgtcgcgaaaccagcgcacgaaatcggcctgcaacgtctgtaaacgtgcttcgctgtgaccaaaagtgcacccccacagaagcagactcatcggccagcgtgccgcacgaccttttatcaataacgcaatggctataatcggtaacaacggcaggacaagtaacgcattcagcggttggcgacgtagtaaatagcgcagaaaactgccgaacatatcctgctgatgcaatgttccatctaagtcaaaaaacaccacacgacgctcgtgagttgccaaaccatattcctctggactgaaacatcctgattaattttcgctactacatagcctaacagatagatcatcacttttccggcaacaatcgaccgcatcatggctaactggaatttttaattcatggcaattagcggcaatggaatataaaattcactcgcgtgtgtctcatattgcctgttgtcgccactatttcatcgcgaggaaagatatgaacggcttacttcgtatccgtcagcgttaccaggggcttgcccagagtgataaaaaactggcggattatctgctgctacaacctgatacggcgcgccatttaagctctcagcaactggccaacgaagccggagtcagtcagtccagcgtcgtgaagttcgcgcaaaaactcggctataaaggttttccggcgcttaagttggcgttgagtgaagcgctggcaagccagccggaaagtccctccgtgcccattcataaccaaatccgcggtgatgatccgttacggctggtcggcgaaaaactgattaaagaaaatactgccgctatgtacgcaacgctaaacgttaatagtgaagagaaactgcatgaatgcgtaacaatgttgcgctctgcgcggcggataattctgaccggtattggcgctagcggtctggtggcgcaaaactttgcctggaagctgatgaagattggcttcaatgctgccgcagtgcgcgatatgcatgcgctactcgcaacagtacaggcgagctcccctgacgatctgttattagccatttcctacaccggtgtacgacgcgagttaaacctggcggcagatgagatgctgcgagtgggcggaaaagtgctggcgattaccggctttactccgaatgccctgcaacagcgtgcttctcattgcctgtataccattgccgaagaacaagcgacaaacagtgctagtatctctgcttgtcacgctcagggaatgttaacggatttgctgttcattgcgctgattcagcaggatctggaactggcaccagaacgtattcgtcatagtgaagcgctggtgaaaaaactggtctgagtaaagaatgcgcgtataatgcccgcccggtttgtgttgttttgagagtttccttatggcgttgttaatcactaaaaaatgcatcaattgtgatatgtgtgaacccgaatgcccgaatgaggcgattagtatgggagatcatatctacgagattaacagcgataagtgtaccgaatgcgtagggcactacgagacaccaacctgccagaaggtgtgcccgatccccaatactattgtgaaagatccggcgcatgtcgagacagaagaacagttgtgggataaatttgtgctgatgcaccacgcggataaaatttaatattctactctggaagtagagtattaattatattactgggaagccttaacgccattatatttatttaattgatgacattagcataatcattcactaagttaatttatatagtatctgcccagacacttatttatagttattaaaggtgcgtccgactggttcaccggacgcaccttaagtacgtttccttgtgttataagaacagaaggatcagctgtaaaacagcaatgatgattttgatgacccgtttaatcaggtatcggcaatcagtcattcgtttttccttaaacaaggaatgcagccattcagattagcccttacatctccccaaaactgaacgtgcgagttattgagggtgcatgctgcactccacaccagagctttgacgacaccactcgtttcaatgggggaattctgtggcatggtgtaaagcacagcaaaatcttcaataacgaagccaattttaatgtacttacgaattggcggtcacgttaatctttccatcaatattgctttcttcgtaaaggctcgagtttttatgctaaagattgcaagttgcttgtaaaagataagtacactgatccataatcgctgttgttgagggtgcatgctgcacaaaattaaagttaaaaagtaaaacccccgttccttaccagttcgggggttttactttttaaagagaacggtattatttttaactttcaataattaccgtggcacaagcatagtgccgctcatctgccagcgttacatgcatatttgcaacgcccagcttttccgccagttttaatgcctcgccccatagccgtagccgtggtttgccgagctcatcattgaatacttcaaattgattaaacgccagaccattgcggatcccggtgccaaacgcttttgctgcggcttctttcacagcaaaacgcttcgccagaaaacgcaccggctggtggtgcgttttccagatagcccattcgttatcgcttaatacgcggcgtgccaggcgatcaccggatcgggcgatcaccgcttcgatgcgagcgatctccacaatatccgtgcctaaacctaatattgccattagccacgcgcttccagcatcagacgcttcatttctgccaccgcatctttcagtccggtcatcactgcacgaccaataatggcatgaccgatattcagttcatgcatctcagggatggcggcaatggctttcacgttgtgataggtcagaccgtgtccggcgttaactttcagaccgaggcttgcggcaaaggtcgcggctttggcgatacgcgccagctcttgcgcctgttcggcgtcagttttggcatcagcatagcaaccggtgtggatctcgataaacggtgcgccaacctctgccgcagctttgatctgctcttcatcggcgtcaataaacagagaaacctgaatcccggcatctgccagacgtttgcaggcatcgcgcattttgtcacgctgccctgcgacatccaggccgccttcggttgttacttcctgacgcttttccggtaccaggcagcaaaaatgtggcttcgtctcaacggcgatcgccagcatctcttcggtcaccgccatctccagattcatgcgggtatccagcgtctgacgcaggatgcgcacgtcgcggtcagtaatgtgacggcgatcttcacgtaaatgcacggtaatgccgtccgctcccgcctgctcggcaataaacgcggcctgcaccggatccgggtaagcggtaccgcgcgcgttgcgcagcgtagcgatatggtcaatgttgacgcctaacagtaattcagccatgacaatcctcatcattcataatgtgttttcaccgttcgcttaggcataaactgccggaacagttccctgctctttaaaggtttaccgccaagatacggcttaagcgccatgcgggtaaagcgtttcgcggcgcgcagtgtgtctgcgtcaggaaattcccgtgcgtttaacgcttttaactgccttccggtgaacgttttattgtcgataacgacgcttgcgataaaccctttttcttcgcgataacgatacgtcatggtgtcatctaccggctcgccgctacccgcacaatgggtaaaattgacgccataacccagatgcccgagcagtgccagttcaaagcggcgcagcgcgggttctggcgtaccagtgacccctgcaagagactgaatgcagtgcaagtaatcgaaaaaaagttcagagaagcgcgtctcgtattccagtacgcgggagagaagttcgttgatgtacagaccgctgtaaagcgtgataccgcttaatggcagcgccaggctgacggcttcagcactgcgcagcgttttgacttcgccacgcccgccaaaacgtagcaagagaggggtgaaaggctgtaatgcacctttcagggtagagcgtttagagcgtgcgcctttggcaaccagacgcacgcgcccgctttcctccgtgaagacgtccagcatcaggctggtttcgctccacgggcgactatgcaggacaaatgcgcgctgccagccttccatcggagttactcttaaagatcgtcaacgtaaccgagactgcgcagtgcgcgttcgtcgtcggcccaaccggatttcacttttacccacagttcaaggtgaacaggcgcttcgaacatttcctgcatgtctttacgcgcttcaatcccgatggttttgatcttggcccctttgttgccaatgaccatcttcttctgcccttcacgctcaacgagaatcaaaccgttgatgtcataaccaccgcgttcgttagagacgaaacgttcgatctccacggtcacggagtacggcagttcagcgccgaggaaacgcatcagtttttcgcggatgatttcagacgccataaaacgctgactgcgatcggtgatgtaatcttccgggaagtgatgagtcgcttcaggtagatgcttacgcacgattgccgcaatagtgtcaacattcagcccggtttcggcagagattggcacgatatcgaggaagttcatctggcttgccaggaactgcaggtgcggcagcagatcggctttctcctgcacgttgtccactttgttcaccgcgaggattaccggcgctttgccttcgcgcagtttgttgagcaccatttcgtcgtccggcgtccagcgggtgccttcaacgacaaaaatcaccagctcaacatcgccaatagagctgctcgccgctttgttcatcaggcggttaatggcgcgtttttcttccatatgcaggcccggtgtatcgacgtagatcgcctgatacgcgccttcagtatggatccccacaatgcggtgacgagttgtctgcgccttgcgggaagtgatggagattttctgccccagcagtttgttcaacaatgtggatttgccaacgttcggacgtccgacgatggcaataaatccgcagtaacttttatcgatgctcattccagctccagttttttcaacgcctgttcggcggcagcctgctcagccttacgacggctactacctgtgccaaccaccggttcactcaggccgctgacctggcagtggatagtaaattcctgatcgtgcgcttcgccacgtacctggactaccagataagtcggcagcggcagatggcgaccctgcaaatattcttgcaagcgcgttttcggatctttttgtttatcgcctgggctaatttcgtccaaacgagtttgataccagttgaggattaatttctcgacggtttgaatatcactgtcgaggaatacgccaccaattaatgcttcgacggtgtcggcgagaatactctcacgacgaaatccaccgcttttaagttcacctggccctaaacgtaagcactcgcctaactcaaattcgcgcgccagttccgccagcgtattgccacggaccagcgtggcgcgcatccggctcatatcgccttcatccacacgagggaaacggtgataaagcgcattggcgataacgtagctcagaatagagtcgcctaaaaattctaaacgctcgttatgtttactgctggcactacgatgagttaatgcctgctgcaacagttcctgatgattaaaagtgtagcccagcttccgttgaagccgattaattacgatggggttcatgcgataccaataaataaatgcgtcaacaattcagcacacgaaacagacctgatatacatggttctgctaactgcttcgctgcagtttcagtttaccggtatatggggaccaacgctgtttcgtgtgccgtggcaacctggaggtgccaaccttaaacttcgggggaatattctatacacaacgacgggggatgtcgttagccacgggagatttatctcataaataattcacgttgtcgccataacggcgacaacgtgaacgaagatggctattaatggatgccgccaatgcgacttaagcgcagaccagtcggccattcgccttcttgcttatcgaagctcatccagatagccgttgcccgaccgaccagattcgcttccggcacaaagccccagtaacggctgtccgcgctgttgtcgcggttgtcgcccatcatgaagtattgtcccggaggaacaatccaggttgccagttgttgccctggctgctggtaatacatccccacctgatcctgcgcaatcggcactgtcagaatgcggtgcgtcacatcacccagtgtctctttacgctcggaaagacgaattccattttctttggtttcgtttttcggcacttcaaagaatccgctggtcgcttccccaccattacggcgactgaaggtctgaacgaaatcgctcggttccacgttactgtaggtgaccggcagcgcgttttcacacgcctggccggaactgcatcccggttgaatcgtcagctctttactgaccggatcgtaagtgactttatcgcccggtaaacccaccgcgcgcttgatgtaatcaagctttggatcttccggatatttaaagaccacgatatcgccgcgtttcggatgaccggtttcgatcagcgttttctggtagataggatctttaatgccataagcaaacttctctaccagaataaaatcaccaattaacagagtcggcatcatgctaccactcgggatctggaacggttcataaataaagctacgcacaatcaatacgatagccagtaccggaaaaacagaagcaccggtttccagccagccaggcttcggcgcaacctttttcaacgttgctttatccagactgtccccggcagccgcctgcgccgctgcctgacgttcccgccgtttaggtgcgaaaaagaatttatccacgcaccataaaatgcccgtcaccagtgtggcaatcaccagaatcagggcaaacatattcgccatgccaactcctaagggttatttgttgtctttgccgacgtgcagaatggcgaggaacgcttcctgcggcagctcgacgttaccgatctgcttcatgcgtttcttaccttctttctgcttctgcagcagctttttcttacggctgatatcgccgccataacatttagccagtacgtttttacgcagctgtttcacggtggatcgcgcaatgatgtgcgtaccaatcgctgcctgaatggcgatatcaaactgctggcgtgggatcagatctttcatcttctccaccaactcgcgaccgcggttttggctattatcacggtgggtgatcaacgccagcgcatcaacacgttcaccgttgattaatacgtctacacgtaccatgtcggacgcctggaagcgcttgaagttgtaatccagagacgcataaccacggctggtagatttcaggcgatcgaagaagtcgagcaccacttccgccatcgggatctcgtacgtcagcgccacctgattaccgtggtaaaccatattggtctgcacgccgcgtttttctacgcacaacgtaataacgttgccgagatatgcctgcggcagcagcatgtgacactctgcaatcggctcgcgcagttcgtagatgttatttaccgcaggcagcttggatgggctgtcgacgtagataacttctctactcgtggtttcaacttcatacactacggtcggcgcagtggtgatcagatccagatcgtattcacgttccagacgttcctggatgatctccatgtgcagcaggccgaggaagccgcagcggaaaccaaagcccagcgcgctggagctttccggctcatagaacagactggcatcgttcaggctgagtttacccagcgcgtcacggaaggcttcatagtcgtcggaacttaccgggaacagaccggcgtatacctgcggtttgactttcttaaagccaggcagcgccttttctgccggattacgcgccagcgttaaggtatcgccgactggagcgccgtggatatctttaatcgcacatacgagccagcctacttcgccacatttcagttcagtgcggtcaacctgtttcggcgtgaagatgcccagacggtcggcgttataggtctgcccggtactcatgactttcactttgtcgcccttacgcagggtgccgtttttaatacggataagactaacaacgcccaggtagttgtcgaaccaactgtcgataattagtgcctgcaacgggccttccggatcgccttccggcggcggaatgtcgcgcaccagacgttcgagaacgtcctgcacaccaacgccggttttcgcactacagcgcaccgcgtcggtggcgtcgatgccgacgatatcttcaatttcttccgccacgcgttcaggatcggctgccggcaggtcaatcttgttcagtaccggcacaacttcgagatccatttccatggcggtgtagcagtttgccagggtttgcgcttctacgccctgcccggcgtcgaccaccagcaatgcaccttcacaggcagccaggctacgggaaacttcataggagaagtctacgtggcccggggtgtcgataaagttaagctgataggtttcgccgtcagacgctttgtagtccagcgtcacgctttgcgctttgatggtaatgccacgctcacgctcaagatccatggaatcgagaacctgcgcctccatttcacggtcagacaggccaccgcagatctggataatacggtcagacagcgtgcttttaccgtggtcaatgtgagctatgatgctaaagttacgtatattcttcataaagtatgattattgtgccttaatgcccggttaaccaggcttttagaagtcgctgttctgagcttaacgtctgtattaatagaaacgccgcattctacactacaacattgaggcgaggaaatgttcataccgtatggattgtggtatctggaaacgtcctcgcatttgttatgcaaaatgcaacaaagccagtgaaatcactggctcgcgtcttcgctagatgtttcaaatcgcacaaggccaggcggcaatgccacgcttaagatgatcggttgccattctgcccgggcagcaaacttacggctgtagccgcgcgcaatcaggaacccgccaataccaccgaggatcgcaccacataatgctgcgacgtcagaagcaaagagtagctgaaataggctagcgataaggaataatcccaccagcgggctcatataaaccagtaatgcggagctaagcaggctgccttcggcgatccccaattccactttttgccccggcactaacggctcatcacagggtacgacaatggtatgcgtggtttgcgggccaagtttatttaacacgcggctaccgcaaccggcgcgactagcgcagctgctgcaactagctttaacatcacaactgaccagcgcctgcccgttttgccaggagacgacggtagcccactctttgatcattgcgctgccccgaacttaatattctcggcaatgcgtttcgccgtttgcggcggcagttcaccgacaatggtgatttcggcgttatcacgtacgcttgtactgacggttctgcgtccggtgcgcaacatctgatcggtgctgcttggcgtagcgcggttaacgtttacgctgaagctgaataatccgtcggaatagagacgactttcgataggcatgttgtccatcgtcggtagcggacgtcgactactggaaacttcgctaaaaccctgtggcaaccaggttggcgtccagctgaatttagctttttcacctacaggaacagaaagcaacggcggcaaatttgccttcgccagcgtctgcatactgctgctgatatcctgattgacgttaaaagcaatcacgcgaaattgttccagcgtttcaccatcgcgatcaaggagatcaacccgcatcggtaatttgctttcggtgtccatccacacgatgtagctgtagcgtgtaccatctcgggcaaccacgcgaatgacttcgcaaagacgatcagcaatacgcgtgcgcccgacggagataaagtcgtagtaaggagaaaggcgtttgaaatcggtatagataaggcttggcagagaatcaacaatgtaatcgccattaagcgtgaacggttcaagtcccggttcaaaatagctgatttcattgccgcgctgtaccacttcccggcgcgggccatccatttgcaacaattgtgcaagaggacggttatcgaggcgtgcatgtcgataacgcagagactcaacaccctgtttattgatgctgatgaaactcagctcgtaattcagactctgactggccaggttcatctgctgtaataacgccccggacgcgggagtggcgctggcgttagcagagaataacaggctacctgtcactaaactcatggcaaaccaaagttgcttcattactggctttgcgttcctaaagtttgaattcctggcacctgtacagcggcttgctgggtttgcgcctgctcaaactgaagctgttcagagtggagtcggcgttgcagttcgtaatcctgcaacattgcattaatgcgacgacgctgctcctgtacctgctgctgttgaccattgtttgcggtcgcttcagaaggtactcccaggcttaccgggctggctttacccatcatcggcagtgtattaaataccggcgtttcgggctgctgggacgtttcagattgtccattatagtgctggacgccaacgataactgcaaggcttacgcatgcggctacgcccatttgggtaagctgtgccgcccacggacgtactttctgccagaatggcattttctgccattgatgcggcgcaggctgggcttccgggatcaatgtcgccggttgacgtactggctcttcttcaatggcggccatcacgcgactagagatatcgaaatggagcacctcgggagtatcaccccgcatactgtcacggattaagtgatagctttcccaggttttctgcatttctgggttatgagccagttcgttaagcagctcactatccagcgtttcgccatccattaaagcggaaagttgttctttctgcatgcctaatacccttatccagtatcccgctatcgtcaacgcctgataagcggttgaactttgttatcaatagcttccctcgctcggaagatacgactacgcaccgtacctaccggacaatccatgatagcggctatctcttcatagctcaggccatccagctcccgcaaggttattgccatgcgtaaatcttccgggagggactcaatagttcggaaaactatctgtctcagttcttcactcaacattaagttctcagggttgctaatttctttcaacgcgccgccactttcgaagttttcagcttcaatggcatccacatcactggaaggtggacgacgcccctgagcaaccaggtaatttttcgctgtatttacagcaatccgatacagccatgtataaaaagcgctatctccccggaagctatccagcgcacgataggctttaataaaagcttcttgtaccacatcgggaacatcaccgctcggcacatagcgggaaaccagactcgccactttatgctgatagcgcactaccagtaagttaaaggctttctgatctcccttctggacccgttcaaccaggacctggtccgttaactgctcgctcatccgaggtaaagtctccccaaaccaaatttccacgcgctatcgaaacgccactccattagctgcaatttgagcaagcaaagggttagagtgtctcgtttttgtaaagttccgtaacgcatctgtttttgtttgtcatgctgtagacggatcattatctatcattataagtctacagaatctgaacatcgcattatctgtgtagaaatgcccatttaactgcctgaagagtaacccaacggcctttttatttcaccacctaatcctccaccagccagtaacttctctttttctcgccgccctgcgtcagcgtgtttagcaactgtaacaaatattaaaatagcaggtgtttatccgcacaacatgatgctatgctgaccaaaccatgtttagtaaattaaacaaagaaaatgaatactctccctgaacatagttgtgacgtgttgattatcggtagcggcgcagccggacttagtctggcgctacgcctggctgaccagcatcaggtcatcgttctaagtaaaggcccggtaacggaaggtagtacattttatgcccagggcggtattgccgccgtgtttgatgaaactgacagcattgacagccatgtggaagacacattgattgccggggctggtatttgcgatcgccatgcagttgaatttgtcgccagcaatgcacgatcctgtgtgcaatggctaatcgaccagggggtgttgtttgatacccacattcaaccgaatggcgaagaaagttaccatctgacccgtgaaggtggacatagtcaccgtcgtattcttcatgccgccgacgccaccggtagagaagtagaaaccacgctggtgagcaaggcgctgaaccatccgaatattcgcgtgctggagcgcagcaacgcggttgatctgattgtttctgacaaaattggcctgccgggcacgcgacgggttgttggcgcgtgggtatggaaccgtaataaagaaacggtggaaacctgccacgcaaaagcggtggtgctggcaaccggcggtgcgagcaaggtttatcagtacaccaccaatccggatatttcttctggcgatggcattgctatggcgtggcgcgcaggctgccgggttgccaatctcgaatttaatcagttccaccctaccgcgctatatcacccacaggcacgcaatttcctgttaacagaagcactgcgcggcgaaggcgcttatctcaagcgcccggatggtacgcgttttatgcccgattttgatgagcgcggcgaactggccccgcgcgatattgtcgcccgcgccattgaccatgaaatgaaacgcctcggcgcagattgtatgttccttgatatcagccataagcccgccgattttattcgccagcatttcccgatgatttatgaaaagctgctcgggctggggattgatctcacacaagaaccggtaccgattgtgcctgctgcacattatacctgcggtggtgtaatggttgatgatcatgggcgtacggacgtcgagggcttgtatgccattggcgaggtgagttataccggcttacacggcgctaaccgcatggccagcaatagtttgctggagtgtctggtctatggctggagcgcggcggaagatatcaccagacgtatgccttatgcccacgacatcagtacgttaccgccgtgggatgaaagccgcgttgagaaccctgacgaacgggtagtaattcagcataactggcacgagctacgtctgtttatgtgggattacgttggcattgtgcgcacaacgaagcgcctggaacgcgccctgcggcggataaccatgctccaacaagaaatagacgaatattacgcccatttccgcgtcagtaataatttgctggagctgcgtaatctggtacaggttgccgagttgattgttcgctgtgcaatgatgcgtaaagagagtcgggggttgcatttcacgctggattatccggaactgctcacccattccggtccgagcatcctttcccccggcaatcattacataaacagataaaaagcctgggtcagcgccgtatacgcttcggaatagttctggtctggcccacgaatgactaagcgatcgctaaagcattctcccgcctgcggggagaatgccagcagcacccgatgcggcagtcgcgcttcgttttccgccacatccgtccgcaaacgtaaatgccagcccatgcttaatgccagctccgtaaaaccattaccaatctgctctggcagcactacgcagaaaaatccctcttcggtaatgcactccgccgcacaggtcagcaagcttgggtgatcaagcgtagtggtatagcgagcctgttcccgttgaggtgtgctgcactctactccctgctgatagtaaggtgggttactgatgattaaatcgaagcgtactgtctgctgtgtaatccactgctgaatatccgccgtatggacgttaatccgctctgcccacggggactggttgatattttcctgcgcctgcgcggcagcttcactttccagttcaactgcatcaatcatcacgctgtcatcggttcgctgcgccagcattaatgccagcaacccgctacccgcgccgatatcaaggcaacgttttaccccagccaccggtgcccatgcgcccaataaaataccatccgttcccactttcatcgcacagcgatcgtgagcaacaaaaaactgtttaaaagtaaatccattacgacgaagcacggatgtagactgactcatgaaaataaaaccttgcaggaaaaacggcgatagcaccgggtgagaacaatacccgagaagcgatatccatacaaacagatgaagattgcagccgtaacgtctataatcagcgccccacacagaggtagaacatgactgtaacgactttttccgaacttgaactcgacgaaagcctgctggaagccctccaggataaaggtttcactcgcccgaccgccattcaggctgccgccattccgcctgcgctcgatggccgtgatgtactcggttctgcgccgacaggcaccggtaaaacggcggcgtatctgctgccagcgttgcagcacctgctcgatttcccgcgtaagaaatccggtccgccgcgtattttgatcctcaccccaactcgcgagctggcgatgcaggtgtccgatcatgcccgcgaactggcgaaacatacgcatctggatatcgccaccatcaccggcggcgtagcctatatgaaccacgcggaagtgttcagcgaaaatcaggacatcgtggtcgccacgaccggacgtctgctgcaatacataaaagaagagaacttcgattgccgcgcggttgaaacgctgatcctcgacgaagcagaccgtatgctggatatgggcttcgctcaggatatcgaacatattgctggcgaaacgcgctggcgtaaacagaccctgctctttagcgcaacgctggaaggcgatgcgattcaggactttgccgagcgtctgctggaagatccggtggaagtttctgccaatccctccacccgtgagcgcaaaaaaattcatcagtggtattaccgcgccgatgatcttgagcataaaaccgcgttgctggtgcatctgttaaaacagccggaagcgacccgcagtattgtgtttgtgcgtaagcgtgagcgtgtgcatgagctggcaaactggctgcgcgaagcgggcatcaacaactgctatctcgaaggtgagatggtacagggcaagcgtaacgaagcgatcaagcgtttgaccgaaggtcgcgtaaacgtactggtcgcaaccgatgttgccgcgcgcggtatcgacattcctgacgtcagccacgtctttaacttcgatatgccgcgcagtggcgatacttatttgcaccgtatcggacgtaccgcgcgcgccggtcgtaaaggcaccgcaattagcctggtggaagcccatgaccatctgctgctgggtaaagtaggccgctatattgaagagccaattaaagctcgcgttattgatgagttacgcccgaaaacgcgtgcgccaagcgaaaagcagaccggcaagccaagcaagaaagtactggctaaacgtgctgagaagaaaaaagctaaagagaaagagaagccgcgggtgaaaaaacgccatcgcgacaccaaaaatattggtaagcgccgtaaaccaagcggaacgggcgtgccaccgcaaacgacagaagagtaatctcaatgccaggtttaagcctggtattaaaagtgctggcaaacgcaaaactgcctgatgcgctacgcttatcaggcctacgtggctcatgcaatatattgaatttgcacgatcttgtaggccggataaggcgttcacgccgcatccggcatgaataaagcgcactttgtcgacaagttaaatgccgggtttaatcccgacattatttttatccagccacaaaactctcttcaacacactgaataaaagtgtgcatcgccgggctaaccgcttttccagcatgatgtgcgcacatggccgtaatggtctggctctgttcgccaaaaggcaattcaattaattctccgcactccaactcttttgccaccgcaaagcgcggtaggtagctgaccccgatattcgccgcgacacaacgcttgatgctttcgatacttataagctcaatggtgttttccaccgtgatccgccgctgacgcagcgtgctctcaaatatctgccggaagacacattgcggttcgttgataataaagctacaggcgttatgtcttcccggctcagtaaaatcgacatctgcaatttgcggactagccaccagcaccagactttgttcacccaactctcgtcgattcagagcatcatcattccctacacgataaaagacgccaacatcggcctcatcattcagtagcgcatcacggatcacgtaacagttcaggctctgcaagcttaaacgcacttttggggcgcgttgccgaaaacgctgcaacacctgcggcattcggtaagagagcaacgtttcgccgctaacaacgcgtagttccccgtccggatcactctcctttttggcagcctcacgaagcgtatccatcactcgggtaagttcataaatgtgcggcagcaacttttttccttcgcgggtaaggcacatccgtcggccaattttctcaaataactggacactaaactcctgctcaagctgctgaatatgaaaagtcaccgtgctttgtgtacagcacaatttttggctagctcgcaaaaaggaaccctcttccaccacggttttaagcgtaataaaacggcgcagatccataaccccaaacctatcgaaaatatcgaatctagaatataaaaacattcatttttttaaatgttccgtgtcgggtactgtctaccaaaacagaggagataacaagtgacaccgacccttttaagtgctttttggacttacaccctgattaccgctatgacgccaggaccgaacaatattctcgcccttagctctgctacgagccatggatttcgtcaaagtacccgcgtgctggcagggatgagtctgggatttttgattgtgatgttactgtgtgcgggcattagttttagtctggcagtgattgacccggcagcggtacaccttttgagttgggcgggggcggcatatattgtctggctggcgtggaaaatcgccaccagcccaacaaaggaagacggacttcaggcaaaaccaatcagcttttgggccagctttgctttgcagtttgtgaacgtcaaaatcattttgtacggtgttacggcactgagcacgtttgttctgccgcaaacacaggcgttaagctgggtagttggcgtcagcgttttgctggcgatgattgggacgtttggcaatgtgtgctgggcgctggcggggcatctgtttcagcgattgtttcgccagtatggtcgccagttaaatatcgtgcttgccctgttgctggtctattgcgcggtacgcattttctattaacgaaaaaaagcggaagaggtcgccctcttccgcttagtaacttgctacttaagccttacaggctttcagtaaaggtacgagcgataacgtcgcgctgctgttccggagtcagagagttaaagcgaactgcataaccggatacacggatggtcagctgcggatatttttccggatgcttaactgcatcttccagagtttcgcgacgcagaacgttaacgttcaggtgttgaccaccttcaacgcgaacttctggtttcacttctactggaacttcacggtattcaatgtcacccagtttgcttactgcaaccacttcatcttctgcataacctgcttttgcaacgatgcaacgcgcttcgcctttttcgctgtccagcagccagaaagagttcagcagatcgtcgttagcggctttagtaatctggatacctgtaatcatgtgatgcctccccggcaaaattatttgatttgttcagcctgtcgcggccaattggtaaaaccattgttgcttgagtgtatatatactcctcaaacacccttgaatctttgatttaaatcaataaaaaccacacatcaagtatggtcgcaaatggattttattgttttacatcaacttatgcgggtgtgaaattttaccaatttacatttttttgcactcgtttaagtctaaaaaatgagcatgattttgttctgtagaaagaagcagttaagctaggcggattgaagattcgcaggagagcgagatggctaacgaattaacctggcatgacgtgctggctgaagagaagcagcaaccctattttcttaatacccttcagaccgtcgccagcgagcggcagtccggcgtcactatctacccaccacaaaaagatgtctttaacgcgttccgctttacagagttgggtgacgttaaagtggtgattctcggccaggatccttatcacggaccgggacaggcgcatggtctggcattttccgttcgtcccggcattgccattcctccgagtttattgaatatgtataaagagctggaaaatactattccgggcttcacccgccctaatcatggttatcttgaaagctgggcgcgtcagggcgttctgctactcaatactgtgttgacggtacgcgcaggtcaggcgcattcccacgccagcctcggctgggaaaccttcaccgataaagtgatcagcctgattaaccagcatcgcgaaggcgtggtgtttttgttgtggggaagccatgcgcaaaagaaaggggcgattatagataagcaacgccatcatgtactgaaagcaccgcatccgagcccgcttagcgcgcatcgtggattctttggctgcaaccattttgtgctggcaaatcagtggctggaacaacgtggcgagacgccgattgactggatgccagtattaccggcagagagtgagtaaatttgcggggaaatgccggatggcagagttgccacccggctgatttatcaggctttattctgacgccaccattcaccaagcaaaacgccggttgcgacagagatattcagcccggcaacgttgcccgtaccgtcaatcttcacgcgcagatcgttcggatcgcgtgcggcatccggtaacccttcatattcctgacccagcaccagtaccattttcgctggcagactagttttgaacagcggtttaccctgctcgctggaagtggtcactacggtgtaacctgcctgacggaaatcatccagcacgttaacaatgttgtcgccagtaatcggctgaacgtgctctgcgccgccttctgcggtacggatagccgccccgctctccagcagtgccgcatcctgcaccacgacacctttcacgccgaagtgcgcgcagctgcgcatcatgccacccaggttatgcgggttagattcgttttccagtgccagaacgcaatcctgcgcgcctgcctggcttacccactgctgcacggttgtaccgttacgctttttgatcaagaagcaaacgccgccgtgatgttccgtgccactcgcttttgtcaattccgcttcatccaccacatggtacgctttgcggtttgctgccatccagcgcaaagcttctttaaaacgcggcgttacactctggataaaccaggcgcgaacaatcgcttccggacggctctggaaaagtgcctgacatgcattttcgccgtagacgcgggtttcttccgcacgctgacgacgcaacacttccggatcaataaaacttttaccactgatgccaccgtgatcggccttttccggcgtctcatcacccggcgcgcgggaaaccgtgcgccacgggctatcttcccacttgcggtcacggggctgactctgtttgtcatcgcgggcggggcgacggccaccgtcagcacgagattttcctggacgcccgccccctttcccggtacgcgggttgtgggtacgtttatcagaatcatcatcactgcggacatacatcactttgaccttgccgcttttacctttcatttcatcgttcatgcttttctccaccagcgctgcgcgaagcgcgcagattacccgaagtccgcgcggttcgccatgatttcgtaccaaagcctgcgactatcatacctattgaataaaacagattgttgtctggaacaatgtccccgataatatgtaacatattagaaacataccggcgtcgttgccgataagtctccttactcatcccgaggttagttatgaataccgtttgtacccattgtcaggccatcaatcgcattcccgacgatcggatcgaagatgcggcaaaatgcggacgctgcggtcacgacttgtttgacggagaggtgattaatgcgaccggtgaaacactcgacaaattgctgaaggatgatctacctgtggtgatcgacttctgggcaccgtggtgcggcccctgccgtaatttcgcaccaatttttgaagatgtcgcgcaagagcgtagcggtaaagtgcgctttgtgaaagtgaataccgaagctgaacgtgaattgagcagtcgctttggaattcgtagtataccgacgatcatgattttcaaaaacggtcaggttgtcgacatgcttaatggcgcagtaccgaaagcgccgttcgatagctggctgaacgaatctctttaatcttaccggggcgcatcttgtgccccgttttctcctctgcgacaatggcgttttttcgacgctctcttatgaccgaaaacgctgttctccagttacgcgccgagcgtattgcgcgcgcaacacgtccttttcttgcccgcggtaatcgcgttcgtcgctgccaacgctgtcttttgccagagaaattatgtctctgtagcacaattaccccagcacaagcaaaaagtcgcttctgtttgctgatgttcgacaccgagccaatgaagcccagtaataccgggcgtctcattgctgatattttgcctgataccgttgcgtttcaatggagccgtaccgaacccagccaggatttgctggagttggtgcaaaacccggactatcagccaatggtggtctttcccgctagctatgctgatgagcaacgggaagtgatcttcacaccacctgccggtaagccaccgctgtttatcatgctcgatggtacctggccggaagctcgcaagatgtttcgtaaaagtccgtatctggataatcttcccgtcatttccgtcgatctttcccggctttctgcctatcgcctgcgtgaagcccaggctgaaggccaatattgtactgccgaggtagccatcgcactgttagatatggccggcgataccggggcggcggcagggttaggcgagcattttacccgctttaaaacacgctatctggcaggaaaaacgcaacatctgggtagcatcacagcagaacagttagaaagcgtttaaaatcattcggtcacttctgcgggagaccggtatgagtcagcgaggactggaagcactactgcgaccaaaaagcatagcggtaattggcgcgagcatgaaacccaatcgcgcaggttacctgatgatgcgtaacctgctggcgggaggctttaacggaccggtactcccggtgacgccagcctggaaagcggtgttgggtgtgttggcctggccggatattgccagcttgccctttacacccgaccttgcggttttatgtaccaatgccagccgtaatcttgctcttctggaagagctcggcgagaaaggctgtaaaacctgcattattctttccgccccggcaagccaacacgaagatctccgcgcctgcgccctgcgccataacatgcgcctgcttggaccaaacagtctgggtttactggctccctggcaaggtctgaatgccagctttagccctgtgccgattaaacgcggcaagctggcgtttattagccaaagcgctgccgtctccaacaccatcctcgactgggcgcaacagcgtaagatgggcttttcctactttattgcgctcggcgacagcctggatatcgacgttgatgaattgcttgactatctggcacgcgacagtaaaaccagcgccatcctgctctatctcgaacagttaagcgacgcgcgacgctttgttagcgcggcccgtagtgccagccgtaataaaccgattctggtgattaaaagcggacgtagcccggcggcacagcgactgctcaacacgacggcaggaatggacccggcatgggatgcggctattcagcgtgccggtttgttgcgggtacaggacacccacgagctgtttagcgcggtggaaacccttagccatatgcgcccgctacgtggcgaccggctgatgattatcagcaacggtgctgcgcctgccgcgctggcgctggatgccttatggagtcgcaatggcaagctggcaacgctaagcgaagaaacctgccagaaactgcgcgatgcactgccagaacatgtggcaatatctaacccgctcgatctacgcgatgacgccagcagtgagcactatattaaaacgctggatattctgctccacagccaggattttgacgcgctgatggttattcatagccccagcgccgctgctcccgcaacagaaagcgcgcaagtattaattgaagcggtaaagcatcatccccgcagcaaatatgtctctttgctgacgaactggtgcggcgagcactccagccaagaggcacgacgtttattcagcgaagccgggctgccgacctaccgtaccccggaaggaaccatcactgcttttatgcatatggtggagtaccggcgtaatcagaagcaactacgcgaaacgccggcgttgcccagcaatctgacttccaataccgcagaagcgcatcttctgttgcaacaggcgattgccgaaggggctacgagcctcgatacccatgaagttcagcccatcctgcaagcgtatggcatgaacacgctccctacctggattgccagcgatagcaccgaagcggtgcatattgccgaacagattggttatccggtggcgctgaaattgcgtagcccggatattccacataaaagcgaagttcagggcgtcatgctttacctgcgtacagccaatgaagtccagcaagcggcgaacgctattttcgatcgcgtaaaaatggcctggccacaggcgcgggtccacggcctgttggtgcaaagtatggctaaccgtgctggcgctcaggagttgcgggttgtggttgagcacgatccggttttcgggccgttgatcatgctgggtgaaggcggtgtggagtggcgtcctgaagatcaagccgtcgtcgcactgccgccgctgaacatgaacctggcccgctatctggttattcaggggatcaaaagtaaaaagattcgtgcgcgcagtgcgctacgcccattggatgttgcaggcttgagccagcttctggtgcaggtttccaacttgattgtcgattgcccggaaattcagcgtctggatattcatcctttgctggcttctggcagtgaatttaccgcgctggatgtcacgctggatatcagcccgtttgaaggcgataacgagagtcggctggcagtgcgcccttatccgcatcagctggaagaatgggtagaattgaaaaacggtgaacgctgcttgttccgcccgattttgccagaagatgagccacaacttcagcaattcattagccgagtcaccaaagaagatctttattaccgctactttagcgagatcaacgaatttacccatgaagatttagccaacatgacacagatcgactacgatcgggaaatggcgtttgtagcggtacgacgtattgatcaaacggaagagatcctcggcgtcacgcgtgcgatttccgatcctgataacatcgatgccgaatttgctgtactggttcgcagcgatctcaaagggttaggcttaggtcgacgcttaatggaaaagttgattacctatacgcgagatcacggactacaacgtctgaatggtattacgatgccaaacaatcgtggcatggtggcgctagcccgcaagctcgggtttaacgttgatatccagctcgaagaggggatcgttgggcttacgctaaatcttgcccagcgcgaggaaagttgagtaaggtactggaaatgttgaccacttaatcgggactggtgttattattgcccgcttatgtcgtctgcattgcacagaggacccttcaatgaacagagaagaaatgcactgtgatgttgagtaaatttaagcgtaataaacatcaacaacaccttgcccaactacccaagatttctcaaagtgttgatgatgtcgatttcttttacgctcccgccgacttccgggagacgctgctggaaaaaatagccagcgcgaagcagcgcatttgcattgtcgccctgtatctcgaacaggatgacggtggcaaaggcattctgaacgcgttgtatgaggctaaaaggcagcgtccggaactggatgtgcgggtgctggtcgactggcatcgtgcacaacgtggacgcattggcgctgcggcatctaacactaacgctgactggtactgccgcatggcgcaggaaaatccgggcgtagatgttccggtttatggcgttccaatcaatactcgtgaagcccttggtgttctgcactttaaaggctttatcatcgacgatagcgtactttatagcggtgccagcctgaacgatgtttacctgcatcagcacgataaatatcgctacgaccgttatcatctgatccgtaaccgtaagatgagtgacattatgtttgaatgggttacacagaatattatgaatggccgcggcgttaatcgtctggatgatgttaatcggccaaaaagcccggaaatcaagaacgatattcgtctgttccgccaggagctgcgtgatgccgcttatcatttccagggcgatgccgacaacgatcagctttctgtaacgccgctagtggggctggggaaaagcagtctgttgaacaagaccattttccatcttatgccttgtgccgagcagaaactaaccatctgtacgccatacttcaacctgccagcaatccttgtgcgcaatattatccagttgctgcgcgaagggaaaaaggtcgaaattattgttggtgataaaaccgcgaatgacttctacattccggaagatgaacctttcaagataattggcgcattgccttatctctatgagatcaatctgcgtcgtttcctgagccgtttgcagtattacgtcaatactgaccagctagtggttcggttatggaaagatgacgacaacacctatcacctgaaagggatgtgggttgatgataagtggatgttgatcaccggtaataacctgaacccgcgcgcctggcgtctggatctggaaaacgccattttgatccacgatccgcaacttgagctggcgccacagcgagagaaagaactggagctgatccgcgagcataccaccatcgttaagcactatcgcgatctgcaaagtattgccgattatccggtgaaggttcgtaaactcatccgccgtttgcgccgtatccgcatcgaccgattaattagccgcatcctgtaatcacaaccccgtcctgtacggggtttgttttttggaggccacgttttgcgtattctttttgtctgttcgctattgttactttctggatgcagccatatggctaacgatagctggagcgggcaggataaagctcaacactttatcgccagcgcgatgctttccgccgccggaaatgaatatagtcagcatcaggggatgagccgggatcgcagtgccatgtttggattgatgttctctgtcagtttgggggcgagtaaagagctttgggatagccgccccgaagggagcggctggagctggaaggatttggcctgggatgtcgccggtgcaagcaccggctataccgtctggcaactgacccgtcattaaagacgcatccccttccctttgcgatgtagcatcaaagaaaccagaaacgccaccacggccatcaaggtcacataccagaagaaggctgtttccattcctatacttttcaggctcaacgctacgtactccgcgctaccaccaaatatagcattagcgaccgcataactcagaccaacgcctaatgcgcgaacctgtgccgggaacatctcagccttcagtattccactgatacttgtataaaaactcactatcagcagggcacacatcaccagaccaaaagcggcataagggctggaaacgttttgcaatgcactgagaataggaacggtaaaaatggctgccaggctaccgaaacataacatactggtacggcgaccaatcttatcgctcagcgcgccaatgagtggttgaataagcatgaatacaaacaatgcggcagtcataatgccactcgccacgttggcatgcattcccgcagtatttaccagatacttctgcatataagtagtgaaggtatagaaacaaagggagcccgcagcggtaaaaccgagaaccatgatgaatgcacggcgattgcgccataatcctttcagagatccagcttcttttaaagcgcgcgtttcttgttggctagtttcatctaactgacgacgtaaccacaacgccacaacagctaacacagctcctaacgcgaaaggaatacgccatccccactctctgagtgcagcgtcttccatggtgtgttgtaaaaccacgacaaccagtagggctagcagttgtccgccgatcaacgtcacatactgaaaacttgcgtaaaaacctttgcgcccttcaacggcaacttcactcatataggtggcgctggtgccatattctccgccaacagataatccctgaaataaacgagcgagaagcaataatgccggagcccacgtacctatagtttcataacctgggaggcaggcgataaccaggcttccgaaacacatcatacacacgcttaacagcatgctttttttgcgaccatgtttatcggctatgcggccaaatagccaaccgcctattgggcgcatcaggaatcccgcagcaaaaacacctgctgtttgtagtagttgagtcgtcgtgttcccggaagggaagaagatgtgggcaaagtagagactacagaagctgtagacatagaaatcgaaccactcgaccagattaccactagaggcccccacaatcgcccaaatgcggcgacgagtatcactacttgtcagtttgctgtctgccgttacagtactttcagccatgccattatgtctcctgccgtaatccgatgcttttgtcggtcgcttttgtttattttttttgtaaaggaaatattatacatttgttgcatatcattatgcaaccttaaccatgaatttagttagcaggaaaatggttattgaggagcttaaggataaatttctggtaaggaggacacgtatggaagtgggcaagttggggaagccgtatccgttgctgaatctggcatatgtgggagtataagacgcgcagcgtcgcatcaggcatttttttctgcgccaatgcaaaaaggccatccgtcaggatggcctttcgcataatttgatgcctggcagttccctactctcgcatggggagaccccacactaccatcggcgctacggcgtttcacttctgagttcggcatggggtcaggtgggaccaccgcgctacggccgccaggcaaattctgttttatcagaccgcttctgcgttctgatttaatctgtatcaggctgaaaatcttctctcatccgccaaaacagcttcggcgttgtaaggttaagcctcacggttcattagtaccggttagctcaacgcatcgctgcgcttacacacccggcctatcaacgtcgtcgtcttcaacgttccttcaggacccttaaagggtcagggagaactcatctcggggcaagtttcgtgcttagatgctttcagcacttatctcttccgcatttagctaccgggcagtgccattggcatgacaacccgaacaccagtgatgcgtccactccggtcctctcgtactaggagcagcccccctcagttctccagcgcccacggcagatagggaccgaactgtctcacgacgttctaaacccagctcgcgtaccactttaaatggcgaacagccatacccttgggacctacttcagccccaggatgtgatgagccgacatcgaggtgccaaacaccgccgtcgatatgaactcttgggcggtatcagcctgttatccccggagtaccttttatccgttgagcgatggcccttccattcagaaccaccggatcactatgacctgctttcgcacctgctcgcgccgtcacgctcgcagtcaagctggcttatgccattgcactaacctcctgatgtccgaccaggattagccaaccttcgtgctcctccgttactctttaggaggagaccgccccagtcaaactacccaccagacactgtccgcaacccggattacgggtcaacgttagaacatcaaacattaaagggtggtatttcaaggtcggctccatgcagactggcgtccacacttcaaagcctcccacctatcctacacatcaaggctcaatgttcagtgtcaagctatagtaaaggttcacggggtctttccgtcttgccgcgggtacactgcatcttcacagcgagttcaatttcactgagtctcgggtggagacagcctggccatcattacgccattcgtgcaggtcggaacttacccgacaaggaatttcgctaccttaggaccgttatagttacggccgccgtttaccggggcttcgatcaagagcttcgcttgcgctaaccccatcaattaaccttccggcaccgggcaggcgtcacaccgtatacgtccactttcgtgtttgcacagtgctgtgtttttaataaacagttgcagccagctggtatcttcgactgatttcagctccatccgcgagggacctcacctacatatcagcgtgccttctcccgaagttacggcaccattttgcctagttccttcacccgagttctctcaagcgccttggtattctctacctgaccacctgtgtcggtttggggtacgatttgatgttacctgatgcttagaggcttttcctggaagcagggcatttgttgcttcagcaccgtagtgcctcgtcatcacgcctcagccttgattttccggatttgcctggaaaaccagcctacacgcttaaaccgggacaaccgtcgcccggccaacatagccttctccgtccccccttcgcagtaacaccaagtacaggaatattaacctgtttcccatcgactacgcctttcggcctcgccttaggggtcgactcaccctgccccgattaacgttggacaggaacccttggtcttccggcgagcgggcttttcacccgctttatcgttacttatgtcagcattcgcacttctgatacctccagcatgcctcacagcacaccttcgcaggcttacagaacgctcccctacccaacaacgcataagcgtcgctgccgcagcttcggtgcatggtttagccccgttacatcttccgcgcaggccgactcgaccagtgagctattacgctttctttaaatgatggctgcttctaagccaacatcctggctgtctgggccttcccacatcgtttcccacttaaccatgactttgggaccttagctggcggtctgggttgtttccctcttcacgacggacgttagcacccgccgtgtgtctcccgtgataacattctccggtattcgcagtttgcatcgggttggtaagtcgggatgacccccttgccgaaacagtgctctacccccggagatgaattcacgaggcgctacctaaatagctttcggggagaaccagctatctcccggtttgattggcctttcacccccagccacaagtcatccgctaatttttcaacattagtcggttcggtcctccagttagtgttacccaaccttcaacctgcccatggctagatcaccgggtttcgggtctataccctgcaacttaacgcccagttaagactcggtttcccttcggctcccctattcggttaaccttgctacagaatataagtcgctgacccattatacaaaaggtacgcagtcacacgcctaagcgtgctcccactgcttgtacgtacacggtttcaggttctttttcactcccctcgccggggttcttttcgcctttccctcacggtactggttcactatcggtcagtcaggagtatttagccttggaggatggtccccccatattcagacaggataccacgtgtcccgccctactcatcgagctcacagcatgtgcatttttgtgtacggggctgtcaccctgtatcgcgcgcctttccagacgcttccactaacacacacactgattcaggctctgggctgctccccgttcgctcgccgctactgggggaatctcggttgatttcttttcctcggggtacttagatgtttcagttcccccggttcgcctcattaacctatggattcagttaatgatagtgtgtcgaaacacactgggtttccccattcggaaatcgccggttataacggttcatatcaccttaccgacgcttatcgcagattagcacgtccttcatcgcctctgactgccagggcatccaccgtgtacgcttagtcgcttaacctcacaacccgaagatgtttcacttcagagttgcgaaaatttgagagactcacgaacaactttcattgttcagtgtttcaattttcagcttgatccagatttttaaagagcaaatatatcaaacaagacttaacagtctgttttgagatattgaggtcggcgactttcactcacaaaccagcaagtggcgtcccctaggggattcgaacccctgttaccgccgtgaaagggcggtgtcctgggcctctagacgaaggggacacgaaaattgcttatcacgcgttgcgtgatattttcgtgtagggtgagctttcattaatagaaagcgaacggccttattctcttcagcctcactcccaacgcgtaaacgccttgctattcacttttcatcagacaatctgtgtgagcactgcaaagtacgcttctttaaggtaaggaggtgatccaaccgcaggttcccctacggttaccttgttacgacttcaccccagtcatgaatcacaaagtggtaagcgccctcccgaaggttaagctacctacttcttttgcaacccactcccatggtgtgacgggcggtgtgtacaaggcccgggaacgtattcaccgtggcattctgatccacgattactagcgattccgacttcatggagtcgagttgcagactccaatccggactacgacgcactttatgaggtccgcttgctctcgcgaggtcgcttctctttgtatgcgccattgtagcacgtgtgtagccctggtcgtaagggccatgatgacttgacgtcatccccaccttcctccagtttatcactggcagtctcctttgagttcccggccggaccgctggcaacaaaggataagggttgcgctcgttgcgggacttaacccaacatttcacaacacgagctgacgacagccatgcagcacctgtctcacggttcccgaaggcacattctcatctctgaaaacttccgtggatgtcaagaccaggtaaggttcttcgcgttgcatcgaattaaaccacatgctccaccgcttgtgcgggcccccgtcaattcatttgagttttaaccttgcggccgtactccccaggcggtcgacttaacgcgttagctccggaagccacgcctcaagggcacaacctccaagtcgacatcgtttacggcgtggactaccagggtatctaatcctgtttgctccccacgctttcgcacctgagcgtcagtcttcgtccagggggccgccttcgccaccggtattcctccagatctctacgcatttcaccgctacacctggaattctacccccctctacgagactcaagcttgccagtatcagatgcagttcccaggttgagcccggggatttcacatctgacttaacaaaccgcctgcgtgcgctttacgcccagtaattccgattaacgcttgcaccctccgtattaccgcggctgctggcacggagttagccggtgcttcttctgcgggtaacgtcaatgagcaaaggtattaactttactcccttcctccccgctgaaagtactttacaacccgaaggccttcttcatacacgcggcatggctgcatcaggcttgcgcccattgtgcaatattccccactgctgcctcccgtaggagtctggaccgtgtctcagttccagtgtggctggtcatcctctcagaccagctagggatcgtcgccttggtgagccgttaccccaccaacaagctaatcccatctgggcacatccgatggcaagaggcccgaaggtccccctctttggtcttgcgacattatgcggtattagctaccgtttccagtagttatccccctccatcaggcagcttcccagacattactcacccgtccgccactcgtcagcgaagcagcaagctgcttcctgttaccgttcgacttgcatgtgttaggcctgccgccagcgttcaatctgagccatgatcaaactcttcaatttaaaagtttgatgctcaaagaattaaacttcgtaatgaattacgtgttcactcttgagacttggtattcatttttcgtcttgcgacgttaagaatccgtatcttcgagtgcccacacagattgtctgataaattgttaaagagcagtgccgcttcgctttttctcagcggcgcggggtgtgcataatacgccttcccgctacagagtcaagcatttctttgcttttctctgttgagattctcaggagaaccccgccgacccggcggcgtgtttgccgttgttccgtgtcagtggtggcgcattatagggagttattccggcctgacaagcgaaaaatataaaaactttatcgttcgctcacttttcaggcaaaacatcttaaatatagtcttttccgtctaacttatagacaaaaacgagccccgaagggctcgttttatcatttactggacggcgacaatccggtcttcattaacttccaggcgaatcactttacccggaaccaattcaccagacagtatttgctgtgccagcgggttttcgatctgctgctgaattgcacgtttcagaggacgtgcaccatagaccggatcgtaaccgttctcgctcagcagtttcagcgcctcgtcagaaatgtggatttcataaccacgttcttccagacgtttgtacagacgtttcaactgaatctgcgcaatgctggcaatgtgctgttcacccagcggatggaagaccaccacttcatcgatacggttaatgaattccggacggaagttatggcttaccacaccgagcaccagctctttcatgtgcgcataatccagttcaccgaagcgttcctgaatcagatcggaaccgaggttagaggtcataatgacgaccgtattacggaagtcgaccgttctcccttgcccgtcagtcagacgcccatcatccagtacctgcaacagaatgttgaagacatccggatgcgctttttccacttcatccagcaggatgacggaatacggacgacgacgcaccgcttcggtcaggtagccaccttcttcataaccgacatatcccggaggcgcaccaaccaaacgagacacgctgtgtttctccataaactcggacatatcgatacggaccatcgcctcgtcgctatcaaacataaagttcgccagcgccttacaaagctctgttttccccacaccagttgggccgaggaacaggaaactaccaatcgggcgatttggatccgccagccccgcacggctacgacgaatagcgttagataccgcatcaaccgcttcgttctgaccaattacgcgatggtgcagttcttgctccatacgcagcagtttttcgcgctcgctttccatcatgcgagaaaccggaatccccgtccaacgcgccagcacttcagcaatttcggcgtcggtcactttattacgcaacagacgcatagttttgccttcgagctgcgttgcggcttccagttgcttttccagttccgggattttgccgtattgcagttcagacatccgcgccaggtcccccacacggcgagcctgttcaatagcgattttcgcctgttccagttccgctttaatggtctgcgtaccagaaaggcttgccttctctgctttccactcttcttctaactcggagtactgacgttctttgtcgctcagttcttcgttgagcatatccagacgttttttactggcttcatcagactctttcattaacgcctgttgttccagtttgagctggatgatacgacgatcgagtcggtcgagttcttctggtttactgtcaatctgcatacgaatgctggatgctgcttcatcgatcaggtcgatggctttatccggcagctgacggtcagcaatgtagcgatgagacaacgtcgccgctgcaacaattgccgggtcagtaatttgcacatggtggtgcaattcgtaacgttctttcaggccacgcagaatcgcaatggtatcttcaacagaaggctcggcaacaaacactttctggaaacgacgttccagcgcagcatctttttcaatgtactggcgatattcgtcaagcgtcgtggcacctacgcagtgcaattcaccacgcgccagcgccggtttcagcatgtttccggcgtccattgcgccatcggctttacccgcgccgaccatggtatgtaattcgtcgataaataggatgacgttgccttcctgtttggcaagatcgttaagcacgccttttaaacgttcttcaaactcaccgcgatatttcgccccagccaccagcgcgcccatatccagcgccagtacccggcggcctttcaacccttccggcacttcgccgttgataatacgctgcgccagaccttcaacgatggcagttttaccgacgccgggttcaccaatcagtaccgggttatttttagtacgacgttgcagcacctgaatggtacggcgaatttcttcatcacgaccaatcaccggatcgagtttgccctgttcggctcgttcggtaaggtcgatggtatattttttcaaagcctgacgttggtcttcagcaccttgatcgttcacgctttcacctccacgcatttgttcaatcgcttgagtaatgttggcggtggtcgcccctgctgctttcaggatgtcggccagcgtgccgcgagactcaagtgccgccagaacgaacagttcactgctgataaagttatcaccacgtttttgcgccagcttgtcgcaaagattaagaacgcgcaccagatcctgacttggctggacatcaccaccagtaccttcaacctgcggtaaacgatttaatgcctgattgatatctgtgcgcaactggccagcatttatgccagcggatgttaataaaggactaacgctacccccttcctgattcagcagggcgctcattaaatgaagtggttcgataaattggttgtcgtgcccgagtgcaagactttgggcatcggcaagagcaagctggaatttattagtaagacgatccagacgcataactcctcccataacggatcaaagttgctactggagattaaatgaggtcatccctcaattattcaaggttattgaccagattaatgtgaaaagaaaatcacgcgtaccggatcgtcttgattctttaggttatatcagccaaatgaaacttgccatacgaccggtggtcttgtcgcgacgataagagaagaaagtctcattttccgtatatgtacaacggtcgccgccgaaaatttgctcaacacccacgttcgccagacgctgccgggcaagctgataaatatccgccagatacttatcaccatgctgaatgaaagctgcacttgctttagcgtctactgccataaacgcctcgcgaacctccccccccacttcgaacgcgcgtggaccaattgccggccctaaccaggcgagaatattttccggattatcagcaaaacaggaaaccgtctcttccagcacgcctgcgcacagtccacgccagccagcatgagcggcggcgacttccgttcccgctcgattgcaaaacagcacagggaggcagtcggcagtcatcactgcgcaaaccgtgccgggcgtattgctataagaggcatccgcccgtttactggcataaggttcgccagtgagcttaagcacatctttgccgtgtacctgctcaagccagaccggtttagaaggcaaattgcccgcagcaaaaagtcgcttgcgattctcctcaacgtgatccgggttatcgccacaatgggcaccgaggttgagactgtcatacgggggcaagctcacgccgccgatacgagtggagctacaggccgcaacaccttttggctgcggccactgcgggacaatcagcttactcataaccagtccacttcatccttatgttcttcgaaatcggcgcgcatcacctcaatcagctccaccatatcttgtggaataggcgcatgccattccatttcgatgccggagatcgggtgataaagacgcagcatggttgcatgtagcgcctggcggtcaaacttacgcagcgtggagataaatgcttcgctagcaccttttggcggacgcggacggccaccataaaccggatcgcccaccagcggatgagtgatatgggccatatgcacgcggatctggtgcgtacgtccagtttccagacgcaaccgcagacgcgtgtgcacacggaagtgttccatgatgcgatagtgagtcaccgctggtttgcccatcggatgcaccgccatatgggtacgtttggtcgggtggcgactgattggctcgtccaccgtgccacctgcggtcatatgaccaatcgccaccgcttcatactcacgagtaatttcacgccgttgcaaagattcgactaaacgcgtctgagccggaacggtttttgccacaaccatcaggccagtggtgtctttatccagacgatggacgatgcccgcacgcggtacatcggcaatgggtggatagtaatgaagcaacgcattcagtaccgtgccatccgggttacccgcgccaggatgtaccaccaggtcgcgcggtttattaatgataataatgtcttcatcttcatagacgatatccagcgggatatcctgcggttcaaaacgcgcttcttcttcaatctcagcgttgatggcaacctgctcgccacccaatactttttctttcggcttatcacaaactttgccgttaaccagcactcgctggtcgaggatccattcttttattcggctacgactataatccgggaacatttcggccaaagcctgatctaagcgttgaccgagttggttttcggacaccgttgcagtgagctgtactcgttgtgccatatatactgcttcttcgtttatcgttggggttttacggctttgccgtttaatatagtgtgctattgtagctggtcttaaccgggagcaggaacagagaatctcccgtattacattttgaggaaagtcaaaacgtcatgacgcgcatgaaatatctggtggcagccgccacactaagcctgtttttggcgggttgcagcgggagtaaggaagaagtacctgataatccgccaaatgaaatttacgcgactgcacaacaaaagctgcaggacggtaactggagacaggcaataacgcaactggaagcgttagataatcgctatccgtttggtccgtatagccagcaggtgcagctggatctcatctacgcctactataaaaacgccgatttgccgttagcacaggctgccatcgatcgttttattcgccttaacccgacccatccgaatatcgattatgtcatgtacatgcgtggcctgaccaatatggcgctggatgacagtgcgctgcaagggttctttggcgtcgatcgtagcgatcgcgatcctcaacatgcacgagctgcgtttagtgacttttccaaactggtgcgcggctatccgaacagtcagtacaccaccgatgccaccaaacgtctggtattcctgaaagatcgtctggcgaaatatgaatactccgtggccgagtactatacagaacgtggcgcatgggttgccgtcgttaaccgcgtagaaggcatgttgcgcgactacccggatacccaggctacgcgtgatgcgctgccgctgatggaaaatgcataccgtcagatgcagatgaatgcgcaagctgaaaaagtagcgaaaatcatcgccgcaaacagcagcaatacataacagaaacctgaaacacaaaacggcagcccttgagctgccgtttttttattctgtcagttgtgaaactgaagcgatttagtcgctatcgatctcatcaaatatggctcgctttgagatattcctcaagtaaaaaaacatctcttcctgcgatttctcacaaaaaagattcgttgacaaaaagtgacaaaattatgagattttcatcacacattttgacatcaggaacggtatgctgaattcaccaagacgggaagacaagaggtaaaatttatgacaatgaacattaccagcaaacaaatggaaattactccggccatccgccaacatgtcgcagaccgtctcgccaaactggaaaaatggcaaacacatctgattaatccacatatcattctgtccaaagagccacaagggtttgttgctgacgccacaatcaatacacctaacggcgttctggttgccagtggtaaacatgaagatatgtacaccgcaattaacgaattgatcaacaagctggaacggcagctcaataaactgcagcacaaaggcgaagcacgtcgtgccgcaacaagcgtgaaagacgccaacttcgtcgaagaagttgaagaagagtaatcctttatattgagtgtatcgccaacgcgccttcgggcgcgttttttgttgacagcgtgaaaacagtacgggtactgtactaaagtcacttaaggaaacaaacatgaaacacataccgtttttcttcgcattcttttttaccttcccctgaatgggaggcgtttcgtcgtgtgaaacagaatgcgaagacgaacaataaggcctcccaaatcggggggccttttttattgataacaaaaaggcaacactatgacaagcgaaaacccgttactggcgctgcgagagaaaatcagcgcgctggatgaaaaattattagcgttactggcagaacggcgcgaactggccgtcgaggtgggaaaagccaaactgctcagccatcgcccggtacgtgatattgatcgtgaacgcgatttgctggaaagattaattacgctcggtaaagcgcaccatctggacgcccattacattactcgcctgttccagctcatcattgaagattccgtattaactcagcaggctttgctccaacaacatctcaataaaattaatccgcacagtgcacgcatcgcttttctcggccccaaaggttcttattcccatcttgcggcgcgccagtatgctgcccgtcactttgagcaattcattgaaagtggctgcgccaaatttgccgatatttttaatcaggtggaaaccggccaggccgactatgccgtcgtaccgattgaaaataccagctccggtgccataaacgacgtttacgatctgctgcaacataccagcttgagcattgttggcgagatgacgttaactatcgaccattgtttgttggtctccggcactactgatttatccaccatcaatacggtctacagccatccgcagccattccagcaatgcagcaaattccttaatcgttatccgcactggaagattgaatataccgaaagtacgtctgcggcaatggaaaaggttgcacaggcaaaaagtccgcatgttgctgcgttgggaagcgaagctggcggcactttgtacggtttgcaggtactggagcgtattgaagcaaatcagcgacaaaacttcacccgatttgtggtgttggcgcgtaaagccattaacgtgtctgatcaggttccggcgaaaaccacgttgttaatggcgaccgggcaacaagccggtgcgctggttgaagcgttgctggtactgcgcaaccacaatctgattatgacccgtctggaaagtcgcccgattcacggtaatccatgggaagagatgttctatctggatattcaggccaatcttgaaagtgcggaaatgcaaaaagcattgaaagagttaggggaaatcacccgtagtatgaaggtattgggctgttacccaagtgagaacgtagtgcctgttgatccaacctgatgaaaaggtgccggatgatgtgaatcatccggcactggattattactggcgattgtcattcgcctgacgcaataacacgcggctttcactctgaaaacgctgtgcgtaatcgccgaaccagtgctccaccttgcggaaactgtcaataaacgcctgcttatcgccctgctccagcaactcaatcgcctcgccgaaacgcttatagtaacgtttgattaacgccagattacgctcactgctcataatgatgtcggcataaagctgcggatcctgagcaaacagtcgcccgaccatcgccagctcaaggcggtaaatcgggctagagagcgccagaagttgctcaagctgaacattttcttctgccaggtgcagcccgtaagcaaaagtagcaaagtggcgcagtgcctgaataaacgccatattctgatcgtgctcgacggcgctaatacgatgcagccgagcgccccagacctgaatttgctccagaaaccattggtatgcttccggtttacgtccatcacaccagaccacaacttgctttgccaggctaccgctgtccggaccgaacatcgggtgtagccccagcaccggaccatcatgcgccaccagcatggcctgtaatggcccatttttcacacttgccagatcgaccagaatacaatctttcggtaaaggcggtaatttgccaataacttgctcagtaacgtggattggcacactaacaatcaccattccggcatcggcaacaatatcagccgctcgatcccagtcatgttgctccagaatccgcacctgataaccgctgagggtcagcatcttctcgaacaggcgtcccatctgaccgccaccgccgacgataaccaccggacgcagactcggacaaagtgttttaaatcctttgtcgttttcactggagtaagattcacgcatcacccgacgcaaaacatcctcaatcagatctggcggtacacccagagcttccgcctctgcacgacggctggccaacatagatgcctcgcgctccggaacataaataggcagtccaaagcggcttttcacctcgcccacttcagcaaccagttccagacgcttcgctaataaattcagcagcgctttatcgacttcatcaatttgatcgcgtaatgcggtcaattcagcaaccataataaacctcttaagccacgcgagccgtcagctgcccgttcagatcctgatgaatttcacgcagcaaggcatcggtcatttcccagctaatgcaggcatcggttacggatacaccgtatttcatttcactgcgcggttgctcggaagactgattgccctcgtggatattactttcgatcatcagaccaataatactgcgattgccatctttgatttgagcaaccacggattctgccaccgcaggctgacggcgataatctttattggaattaccgtggctgcaatctaccatcagagacgggcgcagtcccgcctgttccatctctttttcacattgcgcaacatccgcagggctatagttcggcgctttaccaccgcgcaggatcacatggccgtccggattcccctgagtttgtagcaacgcaacctgccctgcctggttaatgccaacaaaacggtgcggctgggcggcggcgcgcatagcgttaattgctgttgccagactgccgtcggtgccgtttttaaaaccaaccggcatggaaagcccggaggccatttcacggtgagtttggctttccgttgtacgagcaccaattgcactccagctaaacagatcgcccaggtattgcgggctattcggatctaacgcttccgtcgccagtggcagtcccatattcaccagctcaagcagcaatttacgcgcgatctgcagcccggcttctacatcaaaagagccatccatatggggatcgttaattaaccctttccagccgacagtggtacggggtttttcaaaatagacgcgcattaccagatagaggctatcgctgacctctgcggcaagggctttaaatcgacgagcatattccagagcagtttccggatcatgaatggaacaaggaccacatactaccagcagacgaggatcgcgcccggcgataatatcactaatgcttttacggctgtcagcaatctgggcttcttgttgcaggctcaatggaaaagcggccttcagttgttccggagtcattaaaacctgttcgtcggtaatatgtacgttattcagcgcgtctttttgcatgatggcgatcctgtttatgctcgtttgcgatagttgatcctcagcgaggatgacgtaacgataacacataaagtaaagttttcaatccatatttcgtacatttttatttacacaggcaatttagtcgcgctttcaacccttacctctgtatagataaatttacactccctttgaaaacaatccgctatgctttgaaaaaggagaaagaaatgatgaaaaagtttatcgcccccttgttggctttactggttagcggatgtcagattgatccttatactcacgcgccaaccttgaccagcaccgactggtatgatgtcggtatggaagatgcgataagcggcagcgccataaaagatgacgatgcatttagcgatagtcaggcggatcgcggtctataccttaaaggatatgccgaaggacaaaagaaaacttgccagaccgattttacttatgcccgaggactttccggtaaaagctttcctgccagctgcaacaatgttgaaaatgccagccaactgcatgaagtaggcaaaaaggggctgatgaaaatgccagcacaatacgattaaattaattaaaaccccacaaataaattaaacataagattttactcattgtgttttatttctcacattgatgacggtcgcatgaaaaaatgatattttaatgagcattctgaaaaaatatcgatgcatttcgagcgaagatggtggggatccctgaatgcgtttttctcaccgactgttcttacttctgattctcctgctgacgggagcaccaatactcgctcaggagccttctgacgttgcgaaaaacgtgcgtatgatggtttccggtattgtcagttacacccgctggcctgcgctaagtgggccaccaaagttatgtatctttagttctagtcgttttagtaccgccctacaagagaatgccgcgacatctttgccttatctgcctgtcatcattcacactcaacaagaggcgatgattagtggctgcaatggtttttattttggcaacgagagtccgacattccagatggaattaaccgaacaatatccgagtaaggcgttattattaattgccgaacaaaataccgagtgcattattggtagcgccttttgtctgatcatccacaataatgacgtcagatttgccgtaaacctggatgccttaagccgtagcggtgtaaaggtcaacccggatgtcttaatgctcgcacggaagaaaaatgatggataacgataattctcttaataagcgccccacgtttaaaagagcattacgcaacatcagtatgaccagcatatttatcactatgatgctgatctggttgctgctttccgtgaccagcgtgctgaccctgaaacagtacgcgcaaaaaaacctggcactgacagcagcaacaatgacttacagtctggaagcagctgtcgtttttgccgatggccctgcagcaactgaaacactggcagcgctgggccagcaagggcaatttagtactgcagaagtacgtgataagcagcaaaatattctggcatcctggcattacacccgtaaggatccaggcgatactttcagtaatttcataagccactggctcttccctgcccccatcattcagccgattcgtcacaatggtgaaaccattggcgaagtacgcttaaccgctcgcgacagtagtatcagccattttatctggtttagcctcgccgtactgaccggttgtattctgctggcaagtggcatcgcaattaccctcacccgccatttgcacaatggcctggtagaagcgctgaaaaatatcaccgatgtcgtacatgatgtgcgttccaaccgcaatttttcccgacgagttagcgaagaacgtatcgctgagtttcaccgcttcgctctcgacttcaacagtctgctggatgaaatggaagagtggcagcttcgtttacaggctaaaaatgcgcagcttctacgtaccgcgctacatgacccattaaccgggctggctaaccgcgcagcgtttcgtagcggcatcaacacgttgatgaacaattccgatgcccgaaaaacgagcgcgttactatttcttgatggcgataatttcaaatacatcaatgatacctggggtcatgcgacgggcgatagagtcttgattgaaatcgcaaaacggttagctgaatttggcgggctgcgacataaagcataccgcctgggcggcgatgaattcgctatggtgctctatgatgtacagagcgaatctgaagtgcagcagatatgtagtgcactgacacaaatctttaatctcccgtttgatcttcataatggccatcagaccaccatgacattaagcattggttacgcgatgaccattgagcacgcctctgcggaaaaattacaagagcttgccgatcacaatatgtatcaggccaaacaccagcgtgccgaaaagctggtgagataacaaggatatatcgatatgataaagcacctggtagcacccctggttttcaccagtctaatactgactggctgccagtcccctcagggaaagtttactcctgagcaagtcgccgctatgcaatcttatggatttactgaatccgccggcgactggagcctgggcttaagtgatgccattctgttcgcaaaaaatgactacaaattgctcccggaaagccagcaacagatccaaaccatggcagctaaattggccagcacagggctaacacatgcccgtatggatggacacaccgataactatggtgaagacagttacaacgaaggcttaagtttgaaacgggcgaatgtcgtggccgatgcatgggctatgggtggacaaattccacgcagcaatctcaccacacagggtttaggaaaaaaatatcccatagccagtaacaagaccgcccagggccgcgccgagaaccgccgcgtcgcagtggtgattactaccccttaaaacaccagcaaacagataaaaaagggccagccaattggccagcccttcttaacaggatgtcgcttaagcgaaatcttagttaagacgctctttgatacgagcagccttaccagtacgctcacgcaggtagtacagtttagctttacgaacagcaccacgacgtttgacagaaatgctgtcaactaccggagagtgagtctggaagacacgctcaacgccttcgccgttggaaattttacgaacagtgaatgcagagtgcagaccgcggttacgaatagcgataaccacgccctcgaatgcctgcagacgttttttggaaccttcaacaacccatactttcacttccacggtatcacccggacggaaggaaggtacgtcctgcttcatctgctcttgttcaagttgcttaataatgttgctcataatttaatctcttatcctgggtaaactgatatctcgggggcttacgccatcccatcatgtttatgttgctgttgtgcgtgttccgttttgaactccgccagcaaccttgcttgctcttcagtcagagccaggttttccagaagttcaggtcttctaagccaggtacggcccaggctctgtttcaaacgccagcgacgtatctcggcatggttgccgctcagtaacactggcggaacttccatcccttctaacacctcaggccgcgtatagtgcgggcaatccagcaatccttcagcaaaggaatcttccgttgcgctggcttcatgtcccagtactcccggaataaaccgggaaacggagtcaatcagcgtcattgctggtaactcaccaccactgagaacgtaatcgccgatactccattcttcgtcaatttcggtttggatcacgcgctcatctataccttcgtagcgaccgcacaccagaatcaatttttgattcgttgccagttcgctgacgcccgcttgatcaagcttgcgtccctgtggactcagataaatcacctttgcgccttcacccgccgcggcttttgctgcatgaatggcgtcccgcaagggttgcaccatcattaacatccccggtccgccgccgtaaggacgatcgtccacggtacggtgccggtcatgcgtgaagtcgcgaggactccagctctggatgctcagcaggccatttttaactgcccggccagttaccccgtaatcggtaattgcgcggaacatttcaggaaacaggctaattatgccaatccacatagcgccgtcttttaccgtttatccggtggtttaaaaaccaggatcccaatctacttcgatactacgagtagtgagatcgactttcttgataacctgcccatcgaggaacggtacgagacgttccttgataccaaacgcatctttcaggtttgccttaatgacgagaacgtcattagatccggtttccatcatatcgacgactttaccgagatcgtagccttcagtggttactacctggcagcccatcaggtctttccagtagtagtccccctcttcaagctgaggcagctggctactatccacgacaatttcacaattcgtcagcaggttcgccgcatcacgatcgtcaacgcctttcagcttgatgatcatgtcctgattgtggtgcttccagctttccagctggacttgctgccactgacccgccttctggataaaccagggctgatagtcaaaaatgctttcggcgtcttcggtggaagaaaacactctgagccacccacgaataccgtaagagctacccatttttcccaaaacgatgggatcaacaggtgcttgcgcggtgagttgtttgctcatcatgaccaccgtgacagattaagctgctttgtttacttctttgatcagcgcagcaacgcgatcagaaatagttgcgccctggccaacccagtgagcgatgcgatccagatccaggcgagtgccttcttctttttcgctagcgattgggttgaagaaaccaacgcgctcgatgaagcgaccgttgcgtgcattacggctgtcagcgacaacaacctggtagaacggacgctttttagcgccgtgacgtgctaaacgaatagttaccataacatcctcttgtgtgaataaaacaaccggaccccatcgaggaacggagtccggtgtcatattaaaagcccgaaaattttactcatttttgcgggaattgcaatcaacagttgctaactctgctgtaaaaggccgtcggcggtgcagccagtttggtgccggagtgcgcgcagtcaccggagcgtacacgcagtacgtgaggatgacgagcacatcccggtgccaaaatggcaaacaagccaggccgattagcgaccagggaagcctgggggcatcatacccttcatgcttctcatcatcttcgccattccgcccttcttcattttcttcatcatgcgctgcatgtcgtcgaactgtttcagaagacggttaacgtcctgcacctgcataccgcaaccggcagcaatacggcgtttacggctacctttgatgatttctggcttagcgcgctctttcatcgtcatgctgttgatgatggcttccatacgcaccagcactttatcgtccatctgactcttgacgttatccgggatctgccccatgcccggcagcttgcccatcagactagccatgccgcccatatttttcatctggcgcagctgctcaagaaagtcgttgagatcgaagccgtcaccttttttcagcttgctggctaatttctctgcctgcgcgcggtcaactttgctttcgatatcttcgatcaggctcagtacgtcgcccatgccgagaatacggctcgcgatgcggtccggatggaacggctccagcgcctcagttttctcgccaacaccgaggaacttgatcggtttgccagtgatgtgacgaatagagagcgccgcaccgccgcgggcatcgccgtccactttggtcaacactacgccggtaagcggtaacgcttcattgaatgcttttgccgtattggccgcatcctgaccggtcatggcgtcaaccacaaacagggtttcaaccgggttaatgctcgcatggacttgtttgatctcgtccatcatcgcttcgtcaacgtgcagacgaccagcggtatccaccagcagcacgtcgtagaatttcagtttggcttctttcagcgccgcgttaacgatatctaccggcttctgaccaacatcagaagggaagaaatcaacgcccacctgctctgccagcgtctcaagctgtttgattgccgccgggcgataaacgtcggcagaaaccaccagcactttcttcttgtgcttctcgcgcaggaacttaccgagtttaccaacgctggttgttttaccggcaccttgcaggcccgccatcagtacgaccgcaggcggttgcgcagccaggttcagggtctggttctcttcgcccatcgccgcaaccagttcgttacggactattttgacgaactcctgccccggcgtcaggctcttattaacttcatgaccaaccgctttctcttttacgcgattgataaactcacgcactaccggcagagctacgtccgcctccagcagcgccatgcgcacttcgcgcagcgtatcttttacgttgtcttcagtgaggcgtccacggccactgatattgcgcagcgtgcggctcaaacgatcggttaaattatcaaacattgtctctcgcctggggtggaaacggttggccgcaatcgcgacacatcatcagtattttgccgcagtataacatgaaggcgtctttgttgttatgcaacggttggagcagcgtagtcctgacgctatactgcttctctttcttattgctcaaactgtcgacatcactatgcccgtttttgctctgctcgcgcttgtcgcctactccgtcagtcttgcgctgattgttcccggtctgctgcaaaaaaacggcggctggcggcgcatggctattatttctgcggtcattgcgctggtctgccacgcaatcgctctggaagcccgcatcctgcccgacggtgatagcggacaaaacctcagcctgctgaacgttggtagtttggtcagtttgatgatctgtacggtaatgaccattgtggcttctcgcaatcgtggctggctgctgctacccattgtctatgcctttgcgcttatcaacctggcgctggcaaccttcatgcccaatgaatacatcacccatctggaagctacgcctgggatgctggtgcacattggcttaagcctcttttcctatgccacgctaattatcgccgccctgtacgcgctgcaactggcgtggattgattaccaactgaagaacaagaagctggcgtttaaccaggaaatgccgccattgatgagtatcgagcgtaaaatgttccacatcacgcagattggcgtggtgctgctaacgctcacgctttgcactggcctgttctacatgcacaacttatttagcatggaaaatatcgacaaggctgtgctctctatcgtggcgtggtttgtctatattgtgctgctgtggggacattatcatgaaggatggcgtggacgccgcgtcgtctggtttaacgttgcgggcgcggtaattctgacactggcctacttcggcagccgaattgtccagcagttaatcagctaaacccagaaaaggagtttcccctggaacacatttctactactacgttgatcattattctgatcatcatggtggtcatttcagcctatttttccgggtccgaaaccggaatgatgaccctcaaccgctatcgtctgcgacatatggcgaaacagggtaatcgcagcgccaaacgcgtcgaaaaattgctgcgtaagccagaccgcctgataagcctggtgttaatcggcaataacctggtcaatattcttgcctccgcgctcggcactattgttgggatgcgtttgtacggcgatgcgggcgtggcaattgcgactggtgtgctgacttttgtcgtactggtatttgctgaggtattgccgaaaaccattgccgcgctgtacccggaaaaagtcgcttatccgagtagttttctgctggctccgctgcaaattttgatgatgccgctggtctggttgctgaatgctatcacccgtatgctgatgcgcatgatgggtatcaaaaccgatatcgtggttagcggctctttgagcaaagaagagttgcgcactatcgtgcacgaaagtcgcagtcaaatttcccgtcgcaatcaggatatgctgctgagcgtgctcgatctggaaaaaatgaccgttgatgacatcatggtgccgcgcagtgaaattatcggtattgatatcaacgatgactggaaaagcattctgcgccaactctcccacagtcctcacgggcgcatcgtgctctaccgtgatagcctggacgacgccatcagtatgctgcgagtacgtgaagcctggcggttgatgagcgagaaaaaagagttcaccaaagaaaccatgctgcgcgccgcggacgagatctattttgtgccggaaggtacgccgctcagcacgcagttggtaaagtttcagcgcaacaaaaagaaagtcggcctggtcgtcaacgagtatggagacattcaggggctggtgacggttgaagatattctggaagagattgtcggcgatttcactacgagcatgagcccaacacttgccgaagaggtcacgccgcaaaacgacggtagcgtgattatcgatggcaccgccaacgtgcgggaaatcaacaaagcctttaactggcatctaccggaagatgatgcccgcacggttaatggcgtcattcttgaggcactggaagagatccctgtcgcaggcacccgcgtgcgtattggcgagtacgatatcgatattctcgacgtacaggacaatatgattaagcaggtaaaagtttttcctgtgaaaccgctgcgcgagagtgtggcggagtaacgaaaacggcccggcattcgcatgcagggccgtgaattattacgaaagcagaaattaagcttttgctttcgctacagtaaccatcgccgcacgaatcgtacgaccattcagcgtataacccttctgcataatgcccagtacgttacctggcgcaacgtcatcagattccaccattgcgatggcctgatgcacattcgggtccagtgggacgttagtttcggcgatcacttcaacgccaaacttacgcacaacatccagcatgctcttcagcgtcagctcaatgccttcaaccatcgcagacatatccgggttagctttatcagccacttccagcgcacgatccaggctatcaatcaccggcagcaattcgttgatgaatttctccagcgcgaatttgtgggctttttcaatatccagttcagtacgacgacgcaggttttccatttcggcttttacacgcaaaatgccgtcacgttcacgggtctgggcttcagccagctgagcttcgagattcgcaactttttcatcgcgcggatccacctgctcagcagaagcttctggctcaactgcctcaatctcttcgtgctgatccatgataatttcttccggggcttgcccctcaggcgttttctgttctttactactcatgaatttctccgcgtttttttcgcattcatctcgctaacttcgcttattatggggatcagtttcagggtttcaagggaagcactcacattgtcatcaatcttcgcaacaaggacctcggaaaaatgaataatcatttcaagtgtattggcattgtgggacacccacggcaccccactgcactgacaacacatgaaatgctctaccgctggctgtgcacaaaaggttacgaggtcatcgttgagcaacaaatcgctcacgaactgcaactgaagaatgtgaaaactggcacgctcgcggagattgggcaactagctgatctcgcggtagtcgttggtggcgacggtaatatgctgggcgcggcacgcacactcgcccgttacgatattaaagttattggaatcaaccgtggcaacctgggtttcctgactgaccttgaccccgataacgcccagcaacagttagccgatgtgctggaaggccactacatcagcgagaaacgttttttgctggaagcgcaagtctgtcagcaagattgccagaaacgcatcagcaccgcgataaatgaagtggtgcttcatccaggcaaagtggcgcatatgattgagttcgaagtgtatatcgacgagatctttgcgttttctcagcgatctgatggactaattattagcacgccaacaggctccaccgcctattccctctctgcaggcggtcctattctgaccccctctctggatgcgattaccctggtgcccatgttcccgcatacgttgagtgcacgaccactggtcataaacagcagcagcacgatccgtctgcgttttagccatcgccgtaacgacctggaaatcagttgcgacagccagatagcactgccgattcaggaaggtgaagatgtcctgattcgtcgctgtgattaccatctgaatctgattcatccgaaagattacagttatttcaacacattaagcaccaagctcggctggagtaaaaaattattctaattttacgccagcctctttactgtatataaaaccagtttatactgtacacaataacagtaatggtttttcatacaggaaaacgactatgttggcacaactgaccatcagcaactttgctatcgttcgtgagcttgagattgattttcatagcggcatgaccgtaataactggcgagaccggcgcgggtaaatctattgcaatagatgccctcggtctttgtctcggtggtcgcgctgaagccgacatggtgcgtaccggcgctgctcgcgctgacctgtgcgcccgtttttctctgaaagatacgccagcggctctgcgctggctggaagaaaaccagcttgaagacgggcatgaatgtttgcttcgtcgcgtgatcagcagcgatggtcgctcccgtggtttcatcaacggtacagctgttcctctgagtcaactgcgcgaactgggtcagttgctgattcagatccatggtcagcacgctcatcaattactcaccaaacctgagcaccaaaaattcctgcttgatggctatgccaatgaaacctctctactgcaggaaatgaccgcacgttatcagttgtggcatcaaagctgccgtgacctcgcgcatcatcaacagttaagtcaggaacgcgccgcccgtgcggaactgctgcaataccaattaaaagaacttaacgaatttaatccgcagcccggagagtttgaacaaatcgacgaagagtacaaacgtctggcgaacagcggtcaattgctgaccaccagccagaatgcattggcattaatggccgacggtgaagacgcaaacctgcaaagtcagctttacacggctaaacaactggtgagcgaattgattggcatggacagcaaactgtccggcgtacttgatatgctggaagaagctaccatccagattgctgaagccagcgatgaactgcgccactactgcgatcgtctggatctcgatcccaaccgactatttgaacttgaacagcgcatcagtaaacagattagcctggcacgtaaacatcacgtcagccctgaggcattgccacagtattaccagagcctactggaagaacagcagcaactggacgatcaggccgacagtcaagaaacgcttgcgctggcggtaacgaaacatcatcagcaggcactggaaatcgcgcgcgcattacaccaacaacgccagcaatatgcagaagaacttgcacagctgatcaccgacagtatgcatgcgctcagtatgccgcatgggcagtttacgatcgatgttaaatttgacgagcatcacctgggcgctgacggtgccgatcgtattgagtttcgggtaaccaccaacccaggtcagccaatgcagcctattgccaaagtcgcatccggtggtgaattgtcccgcatcgcactggcaatccaggtcatcacggcgcgtaaaatggaaaccccggcactgatttttgatgaagtggatgtagggattagcggtccaacagcggcagttgtcggcaaactgctgcgtcaactcggcgaaagtactcaggtgatgtgtgttacccacctgccacaagtcgcgggatgtggtcatcaacactattttgtcagcaaagaaaccgatggtgcgatgacagaaacgcatatgcaatccctgaataaaaaagcgcggttacaagagctggcgcgcctgcttggtggcagtgaagtcacacgtaatacactggcgaatgcgaaagaactgcttgcagcgtaaacttttttcctgcttcacggtcagagtaaacagcaaaacgccgtaagaccggaaagcaaaaggttttaaagtgatgaaaggtctattatcatcggcatattacagatgagccacgtactgctcgggcccgaaaaggaatcaaatcactatgcgctgtaaaacgctgactgctgcagcagcagtactattgatgttgaccgcaggctgttccactctggagcgagtggtttaccgtcctgacatcaaccaggggaactatctgaccgctaacgacgtatccaaaatacgtgttggcatgacgcaacaacaagttgcgtacgcattgggtacaccgctgatgtccgatccatttggtacgaatacctggttctatgtcttccgccagcaaccaggtcatgaaggtgtaactcagcaaacgctgacgctgacctttaacagtagcggtgtgttgaccaatattgataacaaacctgcgctgagtggtaactaataataaagttgctctcaaagacgttaaaaaaggtgctcaatgagcaccttttttctgtctgttatttattcgcacttttttctgctcgttgcctgcgaagctctttcggatcggcaatgagagggcgataaatctccacccgatcgccatcatgcacactatcgcttagttttgccggacggctgtaaatgccgactttgtttttagttaaatcgatatcggtacgcaattccagcaagccactggcgcgaatagcttcttcaaccgtcgcgccctcctgcagcgtcactcgctgcaggtactgcttctcaggtagcgcataagccacctcaacggcaattttacctggcactgtaaacctctttcgcacgaaccgtaaaagcctggaccatattagccgccagctctttaaacacgcgaccaaaggcgagttcaatcaacttattggtaaactcaaagtcgagatgaaactcgatacgacacgcctcctggctcagcggcgtaaacttccatccaccaatcaatttcttgaacggcccatccaccagattcataagaatactttggttactggtcaactggttgcgggtagtaaacgttttgctgatcccagccttagagacatctaccgccgcagtcatctgcccaggagtggactccagaatccgacttccggtacaacccggcaaaaactgaggataagactgaacgtcattcactaactgatacatttgctccgcgctgtagggtaccagtgcggtccggctaatctgaggcataacaatttccatcaacaaaaatccaacaaataatatcatttatcctgctgtaaaaaaaacgctatcccggcgctgggtaacatcgggttcatgctaagatagagccttgtcccccgcaggattgatatggggtgttttcgatttcagattaccgatgattcacgacgcttatgacgaagaaaaaagcacataaacctggtagtgcgaccatcgcgcttaacaagcgcgcccgtcacgaatactttatcgaagaagagttcgaagcgggacttgccctgcaaggctgggaagttaaatccctgcgcgcaggaaaagccaatatcagcgacagctacgtccttctgcgtgacggagaggcatttctgtttggcgctaacatcacgccaatggccgtggcctccacgcatgtggtgtgcgatcctacccgtacccgcaagttacttctcaaccagcgcgaactggacagtttgtacggtcgcgtcaatcgagaaggctataccgtagtggcgctctccctgtactggaaaaatgcctggtgcaaagtgaaaatcggcgtcgccaaaggtaagaaacagcacgataaacgtagtgatatcaaagagcgcgaatggcaggtggataaagcacgtatcatgaaaaacgcccaccgttaaacctgcactccaattattgaccagttcctcaccgcgcctccctctccggcggcgcgaatgaacatcttattggctatcacatccgacacaaatgttgccatcccattgcttaatcgaataaaaatcaggctacatgggtgctaaatctttaacgataacgccattgaggctggtcatggcgctcataaatctggtatacttacctttacacattggggctgattctggattcgacgggatttgcgaaacccaaggtgcatgccgaggggcggttggcctcgtaaaaagccgcaaaaaatagtcgcaaacgacgaaaactacgctttagcagcttaataacctgcttagagccctctctccctagcctccgctcttaggacggggatcaagagaggtcaaacccaaaagagatcgcgtggaagccctgcctggggttgaagcgttaaaacttaatcaggctagtttgttagtggcgtgtccgtccgcagctggcaagcgaatgtaaagactgactaagcatgtagtaccgaggatgtaggaatttcggacgcgggttcaactcccgccagctccaccaaaattctccatcggtgattaccagagtcatccgatgaagtcctaagagcccgcacggcgcaagccctgcgggcttttttgtgccctcaatttgtcccgcgaagtccgaagagaactaattaaatccgaaccttttaggcccattgataggcccaacgaaaagctctattgtttacgttgggctaaacgcagggagactccccacctttgaaaacaggatgtagcgatgaaacttaacgacagtaacttattccgccagcaggcgttgattaacggggaatggctggacgccaacaatggtgaagccatcgacgtcaccaatccggcgaacggcgacaagctgggtagcgtgccgaaaatgggcgcggatgaaacccgcgccgctatcgacgccgccaaccgcgccctgcccgcctggcgcgcgctcaccgccaaagaacgcgccaccattctgcgcaactggttcaatttgatgatggagcatcaggacgatttagcgcgcctgatgaccctcgaacagggtaaaccactggccgaagcgaaaggcgaaatcagctacgccgcctcctttattgagtggtttgccgaagaaggcaaacgcatttatggcgacaccattcctggtcatcaggccgataaacgcctgattgttatcaagcagccgattggcgtcaccgcggctatcacgccgtggaacttcccggcggcgatgattacccgcaaagccggtccggcgctggcagcaggctgcaccatggtgctgaagcccgccagtcagacgccgttctctgcgctggcgctggcggagctggcgatccgcgcgggcgttccggctggggtatttaacgtggtcaccggtagcgcgggcgcggtcggtaacgaactgaccagtaacccgctggtgcgcaaactgagctttaccggtagcaccgaaattggccgccagttaatggaacagtgcgcgaaagacatcaagaaagtgagcctggagctgggcggtaacgcgccgtttatcgtctttgacgatgccgacctcgacaaagccgtggaaggcgcgctggccagcaaattccgcaacgccgggcaaacctgcgtctgcgccaaccgcctgtatgtgcaggacggcgtgtatgaccgttttgccgaaaaattgcagcaggcagtgagcaaactgcacatcggcgacgggctggataacggcgtcaccatcgggccgctgatcgatgaaaaagcggtagcaaaagtggaagagcatattgccgatgcgctggagaaaggcgcgcgcgtggtttgcggcggtaaagcgcacgaacgcggcggcaacttcttccagccgaccattctggtggacgttccggccaacgccaaagtgagcaaagaagagacgttcggccccctcgccccgctgttccgctttaaagatgaagctgatgtgattgcgcaagccaatgacaccgagtttggccttgccgcctatttctacgcccgtgatttaagccgcgtcttccgcgtgggcgaagcgctggagtacggcatcgtcggcatcaataccggcattatttccaatgaagtggccccgttcggcggcatcaaagccagcggtctgggtcgtgaaggtagcaagtatggcatcgaagattacttagaaatcaaatatatgtgcatcggtctttaactggagaatgcgaatgaacagcaataaagagttaatgcagcgccgcagtcaggcgattccccgtggcgttgggcaaattcacccgattttcgctgaccgcgcggaaaactgccgggtgtgggacgttgaaggccgtgagtatcttgatttcgcgggcgggattgcggtgctcaataccgggcacctgcatccgaaggtggtggccgcggtggaagcgcagttgaaaaaactgagccacacctgcttccaggtgctggcttacgagccgtatctggagctgtgcgagattatgaatcagaaggtgccgggcgatttcgccaagaaaacgctgctggttacgaccggttccgaagcggtggaaaacgcggtaaaaatcgcccgcgccgccaccaaacgtagcggcaccatcgcttttagcggcgcgtatcacgggcgcacgcattacacgctggcgctgaccggcaaggtgaatccgtactctgcgggcatggggctgatgccgggtcatgtttatcgcgcgctttatccttgcccgctgcacggcataagcgaggatgacgctatcgccagcatccaccggatcttcaaaaatgatgccgcgccggaagatatcgccgccatcgtgattgagccggttcagggcgaaggcggtttctacgccagcagcccagcctttatgcagcgtttacgcgctctgtgtgacgagcacgggatcatgctgattgccgatgaagtgcagagcggcgcggggcgtaccggcacgctgtttgcgatggagcagatgggcgttgcgccggatcttaccacctttgcgaaaagcatcgcgggcggcttcccgctggcgggcgtcaccgggcgcgcggaagtaatggatgccgtcgctccaggcggtctgggcggcacctatgcgggtaacccgattgcctgcgtggctgcgctggaagtgttgaaggtgtttgagcaggaaaatctgctgcaaaaagccaacgatctggggcagaagttgaaagacggattgctggcgatagccgaaaaacacccggagatcggcgacgtacgcgggctgggggcgatgatcgccattgagctgtttgaagacggcgatcacaacaagccggacgccaaactcaccgccgagatcgtggctcgcgcccgcgataaaggcctgattcttctctcctgcggcccgtattacaacgtgctgcgcatccttgtaccgctcaccattgaagacgctcagatccgtcagggtctggagatcatcagccagtgttttgatgaggcgaagcagtaacgccgctcctatgccggaggcgacgctgcgcgtcttgtccggcctacggggatccaggtcggataaggcgtttacgccgcatccgacaatctgtacgtgaacaggaagaaatctatgttggccgggtaaggcggagccgctctccggcaaaaagaatcaataacaattatacgcgtgacccggcgcgggaaatgtcggggcgctctcccaagtgacacactttcgagaggattcaggatggggcaaagtagccaaccacatgagttaggcggcgggctgaagagtcgccacgtcaccatgttgtctattgccggtgttatcggcgcaagtctgtttgtcggttccagcgtcgccatcgccgaagcgggcccggcggtattactggcctatctgttcgccgggctactggtggttatgattatgcggatgttggcggaaatggcggttgccacgcccgataccggtagcttttccacctatgccgataaagccattggtcgctgggcgggctataccatcggctggttgtactggtggttttgggtactggttatcccgctggaagccaacatcgccgccatgatcctgcacagttgggttccaggcattcccatctggttattttccctcgtcattaccctcgccttaactggcagtaacttattaagcgttaaaaactacggcgaatttgagttctggctggcgctgtgcaaagtcatcgctatcctggcctttattttccttggtgcagtcgcaattagcggtttttacccgtatgccgaagtgagcgggatcagtagattgtgggatagcggcggctttatgcccaacggtttcggtgcggtattaagcgcgatgttgatcaccatgttcagctttatgggcgcagaaattgtcaccattgccgccgcggaatccgacacgccggaaaaacatattgtccgcgccaccaacagcgttatctggcgtatttctatcttctatttatgttctatttttgtcgtcgtggcattaattccgtggaatatgcccggactaaaagccgtcggttcttatcgcagcgtactggaattgctcaatattccccatgcgaaattaatcatggactgcgtgatattactttccgtaaccagttgcctgaacagcgcgctgtataccgcgagtaggatgctctactccttaagtcgtcgcggtgatgctcccgcggtaatgggtaaaatcaaccgcagtaaaaccccgtacgtggcggtgttactctccaccggcgcggcattcttaacggtggtggtgaactattacgcgcctgcgaaggtatttaaatttctgatcgacagctccggcgctatcgccctgctggtttatttagtcatcgccgttagtcagttgcggatgcgcaaaattctgcgagcagaaggaagcgaaattcgcttgcgaatgtggctttatccgtggctcacctggctagtcatcggctttattacctttgtgttggtagtgatgctattccgtccggcgcaacagttagaagtgatctccaccggcttattagcgatagggattatctgtaccgtgccaattatggctcgctggaaaaagctggtattgtggcaaaaaacacccgttcataatacgcgctgatcatgatcaggagtcacaccatgaccattacgtctctggatggctatcgctggctgaagaacgatattattcgcggtaattttcaaccggatgaaaaattacgaatgagtttgctgacaagccgttatgcacttggcgttgggccgttacgggaagctcttagccaactggtggcggaacggctggtcacggtggtgaatcaaaaagggtatcgggtggcgtctatgagtgagcaggagctgctcgatattttcgacgcccgcgccaatatggaagcgatgttagtgagtctggcgattgcccgcggtggcgatgagtgggaggcagacgttctcgcaaaagcgcatctgctgagtaagcttgaggcctgtgacgccagcgagaaaatgcttgatgagtgggatctgcgtcatcaggcgtttcatacggcaattgtggcgggctgtggttctcactatttgctgcaaatgcgtgaacggttgtttgatctggcggcgcgttatcgatttatctggctgcggcgaacggtgcttagcgtggaaatgctggaggataaacacgatcagcaccagaccctgactgcggcggtactggcgcgagataccgcgcgcgccagtgagttaatgcgccagcatttactgacgccaattcccattatccagcaggcgatggctggcaattaattactcttccggaatacgcaacacttgccccggataaattttatccgggctttttagcatcggtttattcgcttcgaagattttattgtacagattagcgttaccgtagacctgtttggaaatggcactcagagtgtcgccagacttaacggtataaaactggctggcagtggctggtgtcgccgttttcacctgatcatcgacactggcaataccggaaatattccccaccgcaacaaggattttctccttcgcctcctgactcaggccgtcaccagtgaccgtcgctttgccgtcggcaatttgaatattcactttatcggcatccggtataccggttttgttcagatgctcctgcaccttcttcgcctgatcgtctttatcgtgctgacctgtaaccgcgtcccagagtttttctccggcatctttcacaaaattgaacagacccatagctacctcattcgttaacggaaacactcagaaagtgtagcagaggaacgcggcgcgttaacgccgcggggatgagcacaggtttaatcgcgggtttgcacccagaacgcgtgaatcaaaccggggatatacccaagcagtgtcaacagaatattaataatgaacgcccaaccgaaccctttaccgagcagcacgccgagcggcggcagaatgatggtgatgacgattctccagaaacccatatgtactccctataagaaaattactcattgtttaaaaagagattttatctcttaagcgtagtaattttagcggagcctgccagtttcagcttacgcttttactctcatttacgctgctgaggctggtatatgttgcatttttagtttagagtttacttaatttagaaaatacttaaataaatatgactgaactcgcgcaattacaggccagtgccgaacaggcagcggccttattgaaagcaatgagccaccctaaacgattgctgattctgtgcatgcttagcggttcccccggcaccagcgcgggagagctgacgcgcattaccggactgagtgcctctgcgacaagtcagcatctcgctcgtatgcgggacgaagggcttatcgacagccaacgggatgcccaacgcattctatattccattaaaaatgaggcggtaaatgccattatcgccaccctgaaaaatgtctattgtccgtaaggagtcactatggctttgacaaccattagcccgcatgatgcacaagaattaatcgcacgcggcgcaaagttaatcgatattcgtgatgctgatgaatatcttcgtgaacatattcctgaagcagatctggctccattatccgtgctggaacagagtggtcttccggctaaattacgtcacgagcaaattatattccactgccaggcaggtaaacgcaccagtaataatgccgataaattagcagcgattgccgcccccgcagaaatctttttactcgaagatgggattgatggctggaaaaaagcaggattgccagtagcggtaaataaatctcaacccttgccgttaatgcgccaggtgcagatcgctgcgggtggtttaatattaatcggcgttgtactgggttataccgtaaatagcggtttcttcttattaagtggctttgttggtgccgggttactgtttgcaggaatcagcggtttttgtggaatggcaaggttgttagataagatgccgtggaaccaacgagcttgagaagcgacgccggacgcgccctagcagcgacatccggcctcagtaattagatcaggaaatcgtcgagagatttaccttctgccagcgcctgagcaattggcttcggtgtacggccctgaccggtccaggttttagtttcaccgttaacatcggtgaatttatatttcgccggacgcggctggcgttttttaccagcgcgtggtgcagcagcagagctattacccaataactcttccgggttaattccgtcagctttcatcagctccagccaggtgctaattttttcctggcgctctgccagttcacgctgctgctgttcttcttcttcacgtctttctttagtgacaaccctgaatttttcgagcatttcttcaagaacgtcaatggagaattcgcgagccatcgcacggagggtgcgaatgttatttaaactttgtaacattacggacataataaagaaaaccttttaacgccaaaacaaaaaaagtatttcgtcgcgtagtgtaagcgatcacttattatatttccacaaaatttaatctatttacagtcctgcgcgagattatttcagctgttattttctgaaactctcagaataatttcaagattatatattagccattttgatgagtaatttagattattggtgaacagagcggcgctctctgctcgctaattccgcaagcctgacaaaatcaaagtgaataaaaatgcaatataacagaataaaagaaaacatccatcactggtgctttctgctgttaatgtacattgtctggcataaaaaatgctgaaaatgacccagctactacatacaccgaattctctacgcttatagcgttacctcacccccaaactttcattagtgatattaaaggtaaggccatatctaattgatttaattaaaaataaatcatatcggcatgtaaaaatccacaatgtacaaaaaacgagccgttacggaatattttatctacaaaaactgactaaataaaaatttttcactaattgattagtcatagccagcgatatacgctatgcgaaaatgcagatggcaatgagatccactgctttcatctccattaacatcccattacgcttttattaaggagcattagcatgttcagtccgcagagtcgcttgcgtcatgcagttgcagatacgttcgcgatggttgtttactgttctgtcgtgaacatgtgtattgaagttttcctctccggaatgagcttcgaacagtctttttattccagattggtagcgattccggtgaacatcttaattgcatggccatacggtatgtaccgtgatctgtttatgcgcgcggcacgcaaagttagcccgagcggctggataaaaaatctggcggatatcctggcttatgtgacgttccagagtccggtgtatgtggcgatcttgttagtggtgggcgcagactggcatcagattatggcggcggtcagtagtaacatcgttgttagcatgttgatgggggcggtttatggctacttcctcgattattgccgccgactgtttaaagtcagccgttaccagcaggtaaaagcctgactcttcttttcgcgactggcatcgccagtcgcgtctttaactggcttcgccaaataaaccattcaaataacgttcaagcgcaacacggctactaaagccatgcgggataccgtaatgctcgtgtcgctcgcctgctaaatagagcggaaattgctggtaatgatcgcaagttttaatatcggaagcgggttcagccagtgtgctactgcgttcttttaatgttggatgaattaccagagcggtacgtcccattcgcgcttcgcgattaacatagacataattttccccacggcggtaaccatacgctttctgggttaccacatcgacagtaaaaccgactttttcaagtacgcgcgccacctcgtctggtcgtaaatacatatttgatcctcgttattatcaaccgcgggcctaccttacctgattgcgcattcacaacgctttcagaaaagtccataaagccgcgatgaacctcagttaagaaaattatggtctacactgaaaattacatcgaattctaatgggggatcatatgtttaaccgaccgaaccgcaacgacgttgatgatggcgtgcaggatatccagaatgatgtcaatcaattagctgacagcctcgaatctgtattgaagtcctggggcagcgacgccaaaggggaagctgaagccgcacgcagtaaagctcaggcattgctgaaagaaaccagggcgcgaatgcatggtcgtactcgcgtccagcaagccgcgcgcgatgccgttggctgcgcggattcttttgttcgtgaaagaccctggtgtagcgtgggtacagcagctgcggtaggtatttttatcggcgcactgttaagcatgcgcaaaagctaatgcaaaaatgataataaatacgcgtctttgaccccgaagcctgtcttcggggtttctttttgcctggtgaatcacaaaaatccccctaccccgtcacgctcatatccagggtaatttcgaccactatttgctatatattgtgtggttgaatcttttttcaactacatctagtatctctgtatcaacagagagacaacccgacgcgtatcatcgcgccgtatcttcattttaaacggaaatacgaatcatgcgcattactatttacactcgtaacgattgcgttcagtgccacgccaccaaacgggcgatggaaaaccggggctttgattttgaaatgattaatgtcgatcgcgttcctgaagcggcagaagcgttgcgtgctcagggctttcgtcagttgccggtagtgattgctggcgatcttagctggtctggtttccgtccggacatgattaaccgtctgcatccagcgccacacgcggccagtgcatgagccagctcgtctacttctccagcagctccgaaaacacgcagcgttttatcgaacgtttaggtctgcccgcggtgcgcatcccgctcaatgagcgggaacggattcaggtagacgagccttacatcctgatcgtgccctcttacggcggcggcggtacggctggcgcggtgccacgacaggtaattcgctttttaaacgacgagcacaaccgggcgttgcttcgcggcgttattgcttctggtaatcgcaactttggtgaggcgtatggccgcgccggagatgtgattgcccggaaatgcggcgtgccgtggctgtaccgttttgaactcatgggtacgcaaagcgatatcgaaaacgttcgtaaaggagtaaccgaattttggcaacgacaaccgcagaatgcctgacgcaggaaacgatggattaccacgcgctgaatgcgatgcttaacctctacgatagcgcaggtcgcattcagttcgataaagaccgccaggccgttgacgcctttattgcgacgcatgtgcgtccgaacagtgtgaccttcagtagccagcagcagcgcctgaactggctggtcaacgaaggttactatgatgaaagcgttcttaatcgctactctcgcgactttgtcattacgctgtttacccacgcacacaccagcggttttcgtttccagacattcctcggggcatggaagttttacaccagctatacgttgaagacattcgacggtaaacgttatctggaagattttgccgatcgagtaacgatggtggcgctgacgctggcacaaggcgatgagacgctggcgttgcaactgaccgatgaaatgctgagtggacgctttcagccagccacgccaacattcctcaactgcggtaagcagcagcgcggcgaactggtttcctgttttttgctgcgtattgaagacaatatggagagcattggtcgggcggtaaattccgcactgcagctgagcaaacgcggcggcggcgtagcatttttgctgagcaatctgcgagaagcgggcgcgccaattaaacgtattgaaaatcaatcttctggcgtaattccggtgatgaaaatgctggaagacgcattttcctatgccaaccaactcggcgctcgtcagggggctggtgcagtctatttacatgctcatcatcccgatattctgcgttttctcgacacgaaacgggaaaatgccgacgaaaaaatccgcattaaaacactgagccttggcgtggtgatcccggatatcactttccatctggcaaaagagaatgcgcagatggcgctgtttagcccttatgacgtagagcgagtttatggcaagccgtttgccgatgtggccatcagccaacactatgacgaactggttgccgatgaacgcattcgcaaaaaatacctcaacgcccgtgatttcttccagcgactggcagaaatccagtttgagtccggctatccctacatcatgtatgaagacacggtaaaccgtgctaaccctatcgccgggcgcataaatatgagtaatctctgcagtgaaattttgcaggttaacagcgccagtgagtatgacgagaatctcgactatacccgcacaggccatgatatttcctgcaatttaggtagcttgaatattgcgcacaccatggattcccccgattttgcccgcacggtagagactgccgtgcgcggtttaacggcagtaagtgatatgagtcatatccgcagcgtgccgtccatcgaagccggaaatgccgccagccacgccatcggactggggcagatgaatttacacggctatctggcgcgagaaggcatcgcttatggtagcccggaagcactggatttcaccaatctctatttctatgccatcacctggcatgcactgcgtaccagcatgttgctggcacgcgaacgcggtgaaaccttcgccgggttcaaacagagtcgctatgccagtggtgaatattttagccaatatctgcaagggaactggcagccgaaaacggcgaaagttggcgaactgtttacccgtagcggtattacgttacctacccgtgagatgtgggcgcagctgcgcgacgacgtgatgcgctacggcatatacaaccagaatcttcaggcggtgccgccaaccggttctatctcttatatcaaccatgctacgagcagtattcatccgattgtggcgaaagtagagatacgcaaagagggcaaaacaggacgcgtttactaccctgccccgtttatgactaacgagaatctggcgctgtatcaggacgcttacgaaattggcgcagaaaagatcatcgacacctacgcggaagcgactcgccatgtcgatcaggggctgagcctgacgctttttttccccgataccgccaccactcgcgatatcaacaaagcgcagatttacgcctggcgcaagggtatcaaaacgctctattacatccgcctgcgtcagatggcgctggaaggcactgaaattgaaggctgcgtctcctgtgcactttaaggaatatctatgaaactcagtcgtatcagcgccatcaactggaacaagatatctgacgataaagatctggaggtgtggaatcgcctgaccagcaatttctggctaccagaaaaggtgccgctgagcaacgatattcctgcctggcagacattaactgtcgtagaacaacaactgacgatgcgcgtttttactggcctgacgctgctcgacacgctgcaaaatgttatcggcgcgccttctctgatgcccgatgcactcacgcctcatgaagaagcggtattaagcaatatcagctttatggaagcggttcatgcccgctcttacagtagcattttcagcacgctatgccagaccaaagatgtcgatgccgcctacgcctggagtgaagaaaacgcaccgttgcagcgaaaagctcagattattcagcaacattatcgcggtgatgatccgctgaaaaagaaaatcgccagtgtgtttcttgaatcttttttgttctattccggtttctggctgccgatgtatttttccagccgcggaaagctgaccaataccgcggacctgatccgtctgattatccgcgatgaagcagtccacggttactacataggctataaatatcagaaaaacatggaaaagatatctctgggacaacgtgaagagttgaagagtttcgccttcgatttgttgctggaactctacgacaacgagttgcaatacaccgatgagctgtacgccgaaaccccgtgggctgacgatgtgaaagcgtttctctgttacaacgccaataaggctttgatgaatctgggctacgaaccgttatttcccgcagaaatggcggaagtgaatccggcaatcctcgccgcgcttagcccgaatgccgatgaaaatcacgatttcttttccggtagtggctcctcttatgtgatggggaaagcggttgaaacagaagatgaagactggaatttctgagggtgttattttcaaaaatatcactacccgcagcagggaaataattcccgccaaatagctttttatcacgcaaataatttgtggtgatctacactgatactctgttgcattattcgcctgaaaccacaatattcaggcgttttttcgctatctttgacaaaaaatatcaactttctcgatttgctctcagcccttatatcacgggaaattccggcgatttgctcgcatcaatattcatgccacatttgccatcaggggttgcctcagattctcagtatgttagggtagaaaaaagtgactatttccattgggtaatatatcgacatagacaaataaaggaatctttctattgcatggcaattaaattagaaattaaaaatctttataaaatatttggcgagcatccacagcgagcgttcaaatatatcgaacaaggacttagtaaagaacaaattctggaaaaaactgggctaagccttggcgtaaaagacgccagtctggccattgaagaaggcgagatatttgtcatcatgggattatccggcagcggtaaatccacaatggtacgccttctcaatcgcctgattgaacccacccgcgggcaagtgctgattgatggtgtggatattgccaaaatatccgacgccgaactccgtgaggtgcgcagaaaaaagattgcgatggtcttccagtcctttgccttaatgccgcatatgaccgtgctggacaatactgcgttcggtatggaattggccggaattaatgccgaagaacgccgggaaaaagcccttgatgcactgcgtcaggtcgggctggaaaattatgcccacagctacccggatgaactctctggcgggatgcgtcaacgtgtgggattagcccgcgcgttagcgattaatccggatatattattaatggacgaagccttcagcgcgctcgatccattaattcgcaccgagatgcaggatgagctggtaaaattacaggcgaaacatcagcgcaccattgtctttatttcccacgatcttgatgaagccatgcgtattggcgaccgaattgccattatgcaaaatggtgaagtggtacaggtcggcacaccggatgaaattctcaataatccggcgaatgattatgtccgtaccttcttccgtggcgttgatattagtcaggtattcagtgcgaaagatattgcccgccggacaccgaatggcttaattcgtaaaacccctggcttcggcccacgtagcgcactgaaattattgcaggatgaagatcgcgaatatggctacgttatcgaacgcggtaataagtttgtcggcgcagtctccatcgatagccttaaaaccgcgttaacgcagcagcaaggtcttgatgcggcgctgattgatgcgccgttagcagtcgatgcacaaacgcctcttagcgagttgctctctcatgtcggacaggcaccctgtgcggtgcccgtggtcgacgaggaccaacagtatgtcggcatcattagcaaaggaatgctgctgcgcgctttagatcgtgagggggtaaataatggctgatcaaaataatccgtgggataccacgccagcggcggacagtgccgcgcaatccgcagacgcctggggtacaccgacgactgcaccgactgacggcggtggtgctgactggctgaccagtacgcctgcgccaaacgtcgagcattttaatattctcgatccgttccataaaacgctgatcccgctcgacagttgggtcactgaagggatcgactgggtcgttacccatttccgtcccgtcttccagggcgtgcgcgttccggttgattatatcctcaacggtttccagcaattgctgctgggtatgcccgcaccggtggcgattatcgttttcgctctcatcgcctggcagatttccggggtcggaatgggtgtggcgacgctggttagcctgattgccatcggcgcaatcggtgcctggagccaggcaatggtgactctggcgctggtgttaaccgccctgctgttctgtatcgtcatcggtttgccgttggggatatggctggcgagaagtccgcgagcggcgaaaattattcgtccactgcttgatgccatgcagaccacgccagcgtttgtttatctggtgccaatcgtcatgctatttggtatcggtaacgtgccgggcgtggtggtgacgatcatctttgctctgccgccgattatccgtctgaccattctggggattaaccaggttccggcggatctgattgaagccagccgcagtttcggtgccagcccgcgccagatgctgttcaaagttcagttaccgctggcgatgccgaccattatggcgggcgttaaccagacgctgatgctggccctttctatggtggtcatcgccagcatgattgccgtcggcgggttgggtcagatggtacttcgcggtatcggtcgtctggatatggggcttgccaccgttggcggcgtcgggattgtgatcctcgccattatcctcgatcgtctgacgcaggccgttgggcgcgacagtcgcagtcgcggcaaccgtcgctggtacaccactggccctgttggtctgctgacccgcccattcattaagtaactctgcacttgcccggtgacgccgggcattatcaccctgccaaaaaaaggaataacaatgcgacatagcgtactttttgcgacagcgtttgccacgcttatctctacacaaacttttgctgccgatctgccgggcaaaggcattactgttaatccagttcagagcaccatcactgaagaaaccttccagacgctgctggtcagtcgtgcgctggagaaattaggttataccgtcaacaaacccagcgaagtagattacaacgttggctacaccagccttgcttccggcgatgcaaccttcaccgccgtgaactggacgccactgcatgacaacatgtacgaagctgccggtggcgataagaaattttatcgtgaaggggtatttgttaacggcgcggcacagggttacctgatcgataagaaaaccgccgaccagtacaaaatcaccaacatcgcacaactgaaagatccgaagatcgccaaactgttcgataccaacggcgacggaaaagcggatttaaccggttgtaaccctggctggggctgcgaaggtgcgatcaaccaccagcttgccgcgtatgaactgaccaacaccgtgacgcataatcaggggaactacgcagcgatgatggccgacaccatcagtcgctacaaagagggcaaaccggtgttttattacacctggacgccgtactgggtgagtaacgaactgaagccgggcaaagatgtcgtctggttgcaggtgccgttctccgcactgccgggcgataaaaacgccgataccaaactgccgaatggtgcgaattatggcttcccggtcagcaccatgcatatcgttgccaacaaagcctgggccgagaaaaacccggcagcagcgaaactgtttgccattatgcagttgccagtggcagatattaacgcccagaacgccattatgcatgacggcaaagccagtgaaggcgatattcagggacacgttgatggttggatcaaagcccaccagcagcagttcgatggctgggtgaatgaggcgctggcagcgcagaagtaatttttattcgggcggataaggcgtttttgccgcatccgccgttctgtgcacaatgcctgatgcgacgctggcgcgtcttatcatgcctacaaaccacatcgcacatttcaacaatctatctttcatcccatattcatcaacatccgctattattgatttccagcttaatcatcacctgatgaacaaaaataatgactaaacctaatcatgagcttagcccggcgctgatcgtgctgatgtctatcgccaccggtctggcggtagccagtaactattacgcccagccattgctcgacaccatcgcgcgtaacttttccctttccgccagtagcgcaggctttattgttaccgccgcgcagttgggctatgccgcaggtctactgtttcttgttcccctcggtgatatgtttgaacgccgccgcctgattgtcagcatgaccttactggcggcatgttgattaccgccagcagtcagtcgctggcgatgatgatcctcggtacggcattaaccggtttattcagtgtcgtggcacaaattctggttccgctggcagcgacgctggctagtccggataaacgcggcaaagtggttggcactattatgagcggtctgctgttggggatcttgctggcacggacagttgccggattgctggcgaatctcggcggctggcgcaccgtcttttgggttgctagcgtgttaatggcactgatggcgctggcattatggcgtggtctgccacaaatgaaaagtgaaacccacctcaactacccacagttgttgggttccgttttcagtatgtttatcagcgataaaattctgcgtacccgcgcgttgctgggctgcctgacctttgccaatttcagcattctctggaccagtatggcctttttgcttgccgctccaccttttaactacagcgatggtgtcattggtctgtttggacttgcgggagctgccggagcgttgggcgctcgtccggcgggcggttttgccgataagggcaaaagccaccacaccacaactttcggtctgctgctgctattacttagttggctggcgatctggtttggtcacacttccgtactggcgttgattatcggaatcctggtgctggatctcaccgtgcagggcgtgcatatcactaaccagacggtaatttatcggatacatcctgatgcgcgcaatcgcctgaccgcaggttacatgactagctactttattggcggtgccgccggtagcctaattagtgccagtgcctggcaacatggcggttgggctggcgtttgtctggctggcgcgacgattgccctggttaacttactggtctggtggcgaggttttcatcgtcaggaagccgcaaattaagcaatcagcaaccgttttcgtggctttacacttataagggtgttaagaagcccatcagtctgataaggttaagatattcattcagtctatttataatattaacaatcgttaagcgtacactctatggaaagccctactccacagcctgctcctggtagcgcgaccttcatggaaggatgcaaagacagtttaccgattgttattagttatattccggtggcctttgcgttcggtctgaatgcgacccgtctgggattctctcctctcgaaagcgtttttttctcctgcatcatttatgcaggcgcgagccagttcgtcattaccgcgatgctggcagccgggagtagtttgtggattgctgcactgaccgtcatggcaatggatgttcgccatgtgttgtatggcccgagtctgcgtagccgtattattcagcgtctgcaaaaaagcaaaaccgccctgtgggcgtttggcctgacggatgaggtttttgccgccgcaaccgcaaaactggtacgcaataatcgccgctggagcgagaactggatgatcggcattgccttcagtagttggagtagctgggtatttggtacggtaataggggcattctccggcagcggcttgctgcaaggttatcccgccgttgaagctgcattaggttttatgcttccggcactctttatgagtttcctgctcgcctctttccagcgcaaacaatctctttgcgttaccgcagcgttagttggtgcccttgcaggcgtaacgctattttctattcccgtcgccattctggcaggcattgtctgtggctgcctcactgcgttaatccaggcattctggcaaggagcgcccgatgagctatgaggttctgctgcttgggttactagttggcgtggcgaattattgcttccgctatttgccgctgcgcctgcgtgtgggtaatgcccgcccaaccaaacgtggcgcggtaggtattttgctcgacaccattggcatcgccagcatatgcgctctgctggttgtctctaccgcaccagaagtgatgcacgatacacgccgtttcgtgcccacgctggtcggcttcgcggtactgggtgccagtttctataaaacacgcagcattatcatcccaacactgcttagtgcgctggcctatgggctcgcctggaaagtgatggcgattatataacccacaagaatcatttttctaaaacaatacatttactttatttgtcactgtcgttactatatcggctgaaattaatgaggtcatacccaaatggatagtagctttacgcccattgaacaaatgctaaaatttcgcgccagccgccacgaagattttccttatcaggagatccttctgactcgtctttgcatgcacatgcaaagcaagctgctggagaaccgcaataaaatgctgaaggctcaggggattaacgagacgttgtttatggcgttgattacgctggagtctcaggaaaaccacagtattcagccttctgaattaagttgtgctcttggaagttcccgtaccaacgcgacgcgtattgccgatgaactggaaaaacgcggttggatcgaacgtcgtgaaagcgataacgatcgccgctgcctgcatctgcaattaacggaaaaaggtcacgagtttttgcgcgaggttttaccaccgcagcataactgcctgcatcaactctggtccgcgctcagcacaacagaaaaagatcagctcgagcaaatcacccgcaaattgctctcccgtctcgaccagatggaacaagacggtgtggttctcgaagcgatgagctaacgcgtcatctcgctcaaaaatccagatttataaaagaaaaaatgactggccagcatcgcaacatgctggcctttttggcaagcaggtcggctcagccgatgagttaagaagatcgtggagaacaatatgagcgcaaatgcggagactcaaaccccgcagcaaccggtaaagaagagcggcaaacgtaagcgtctgctcctccttctcaccttgctctttataattattgccgtagcgatagggatttattggtttttggtactgcgtcacttcgaagaaaccgatgacgcatacgtggcagggaatcaaattcaaattatgtctcaggtgtctggcagcgtgacgaaagtctgggccgataacaccgattttgtaaaagaaggcgacgtgctggtcactctcgacccgacagatgctcgccaggcgtttgaaaaagccaaaactgcactggcttccagcgttcgccaaacccaccagctgatgattaacagcaagcagttgcaggcgaatattgaggtgcagaaaatcgccctcgcgaaagcacaaagcgactacaaccgccgtgtgccgctgggcaatgccaacctgattggtcgcgaagagctgcaacacgcccgcgacgccgtcaccagtgcccaggcgcaactggacgtcgcgattcaacaatacaatgccaatcaggcgatgattctggggactaaactggaagatcagccagccgtgcaacaggctgccaccgaagtacgtaacgcctggctggcgctggagcgtactcgtattatcagtccgatgaccggttatgtctcccgccgcgcggtacagcctggggcgcaaattagcccaacgacgccgctgatggcggtcgttccagccaccaatatgtgggtggatgccaactttaaagagacgcagattgccaatatgcgtatcggtcagccggtcactatcaccacggatatttacggcgatgatgtgaaatacaccggtaaagtggttggtctggatatgggcacaggtagcgcgttcagtctgcttccagcgcaaaatgcgaccggtaactggatcaaagtcgttcagcgtctgcctgtgcgtatcgaactggaccagaaacagctggagcaatatccgctgcgtatcggtttgtccacgctggtgagcgtcaataccactaaccgtgacggtcaggtactggcaaataaagtacgttccactccggtagcggtaagcaccgcgcgtgaaatcagcctggcacctgtcaataaactgatcgacgatatcgtaaaagctaacgctggctaatccagaggtgcgtgtgatgcaacagcaaaaaccgctggaaggcgcgcaactggtcattatgacgattgcgctgagtctggcgacattcatgcaggtgctggactccaccattgctaacgtggcgatccccactatcgccgggaatctgggcagtagcctcagccagggaacgtgggtaatcacttctttcggggtggcgaatgccatcagcatcccgcttaccggctggctggcaaagcgcgtcggggaagtgaaactgttcctttggtccaccatcgcctttgctattgcgagctgggcgtgtggtgtctccagcagcctgaatatgctgatcttcttccgcgtgattcaggggattgtcgccgggccgttgatcccgcttagccaaagtctattgctgaataactacccgccagccaaacgcagcatcgcgctggcgttgtggagcatgacggtgattgtcgcgccaatttgcggcccgatcctcggcggttatatcagcgataattaccactggggctggatattcttcatcaacgtgccgattggcgtggcggtggtgttgatgacactgcaaactctgcgcggacgtgaaacccgcaccgaacggcggcggattgatgccgtggggctggcactgctggttattggtatcggcagcctgcagattatgctcgaccgcggtaaagagctggactggtttagtagtcaggaaattatcatccttaccgtggtggcggtggtggctatctgcttcctgattgtctgggagctgaccgacgataacccgatagtcgatctgagcttgtttaagagccgcaacttcaccatcggctgcttgtgtatcagcctcgcgtatatgctctacttcggcgctattgttctgctgccgcagttgttgcaggaggtctacggttacacggcgacctgggcaggtttggcctctgcgccggtagggattattccggtgatcctgagcccgattatcggccgcttcgcgcataaactggatatgcggcggctggtaaccttcagctttattatgtatgccgtctgcttctactggcgtgcctatacctttgaaccaggtatggattttggcgcgagcgcctggccgcagtttatccaggggtttgcggtggcctgcttctttatgccgctgaccaccattacgctgtctggtttgccaccggaacgactggcggcggcaagcagcctctctaactttacgcgaacgctggcggggtctatcggcacgagcataaccacgaccatgtggaccaaccgcgagagcatgcaccatgcgcagttgactgagagcgtaaacccgttcaacccgaatgcccaggcgatgtacagtcaactggaagggcttgggatgacgcaacagcaggcaagtggctggattgcccagcagatcaccaatcaggggctgattatttccgccaatgagatcttctggatgagtgccgggatattcctcgtcctgctggggctggtgtggtttgctaaaccgccatttggcgcaggtggcggcggaggcggtgcgcactaagtacaactaagccagttcatttgaactggcttttttcaattaattgtgaagatagtttactgattagatgtgcagttcctgcaacttctctttcggcagtgccagttcttcgttgctgttgatgcgtacgtcacgttccagaatgctacgcgcaatatcctgcgcttcctgcaagctgtgcatctggtaagtgccacactggtagacgttcagttccgggatctgattctgatcctgcactttcagcacgtcttccattgccgttttccaggcatcagcaacacgctgctcatctggcgtaccaatcagactcatataaaaaccggtgcggcagcccattgggctgatatcgataatctctacaccattaccgttaagatggttacgcataaaaccagcaaacaggtgctccagggtatggatccctctttctggcatcacttctttgttcggcacgcagaagcgcagatcgaacacggtgattgcgtcgccatgcggggtgttcattgttttcgccacccgaactgcaggcgcttccatccgggtatgatcgactgtgaagctatctaacaacggcatttagccacctccggtaatttttttaaaaattttctgaactctttcttcccaggcgagtctgagtatatgaaagacgcgcatttgttatcatcatccctgaattcagagatgaaattttggccactcacgagtggcctttttcttttctgtcaggcgtgtttttccagccacaccgcaaacggttcggtatcagcggcttccatttcctgctgacggcgttcagacgcctcgcgctcggctacaaaatcctcttcgcgcagaatttccagcggctcttcacgcagcagattacggtaggcttctgcaaatgctttgcctgttccgccaataccagtatcaatcatagaccttaagatacgggcagagaaagtcagatcgggattatcgaagcaggcaaccagttcatcacacactttctgatacgcttcgccgccgttaatactatccagcgtttgcgcgacgcgtttcagatcgcggaacagatctttacccacctgcggtaacgggaactgtgcggtttcgcagccgatacccagcgtcagacccggtttgcgaccttcgaggatcacccggttccagttaacgcgtgtacaggcaagttcgctactgctcatttccggtgcatcagccagcgcacaccagaccataaacaggtcgaggaatcgcacctgctgttcatctacaccaatcgggctgaacgggttgatgtccaggctacgcacttcaatatattcaatgccgccacgtaacagcgcatcagaagggctctcgccgctgcgggtaacgcgttttggacgaatcggcgcgtacagttcgttttcaatctgcaacacgttgctgttgatttgcagcctcttaccgtctttctcaataccaatcttcgcgtactcttcgcttggcgttttgattgcctgtttaaggcccgctacgtactcgtaaagatcgttgaaggtaataccaagattgctttggcttttattggtatagccgagatcgctcaaacgaagagaggtcgcatacggcaggtaatacataccgcactcggttttctcaaacggcaggctcgttggttttccttgcaggaaagaagaacaaatcgccggagatgcaccaaacagataaggaatgacccaaccgaaacgatagtaattgcggataacgcggaaatagcccgcagaaattttctctttggcatcagcgccgctgatatcaccgcacttcgcttgccagaatgccattggcaaagagaaattgtagtgcacgccggaaatggtttgcatcagcgcgccgtagcgatttttcagcccttcacgatacagcgttttaaagcgtccggtgttagaagtgccgtactgtgccagttcgatgtcctgaccttctgcgatgtagcatggcatacttaacggccacatccgctcatcgcccatattgcgcgccgtataacgatgcagatcgcgcataaaggtcagcatatgttcaatatcaccatccactggtgtaatgaattccagcaatgcttccgcaaaatcggtagtaatccatttgtgcgtcagtgcggaacctaatgcttcaggatgacctgttgttgccagtgtgccatcagcattaacacgcaaagtttcgcgctccagcccacgctgtatcccctttaacgcctgaggatgtttttccagccaggccagcgcctgacttacgtccgggatcaaattgacctcccgcctgtcaaaatcgttttaattagcataactgtaatggtgaccatatgtgcaggcctacaattagtgccaccacatcatgccctgaacggtcgctgctgcaactgcaacatagcgtaacgctttaccaaggcacaaaaaaaagattaccggtccccagctgatgcgcatccatcccgctaacagacacagtaaatcgccaaccacgggcatccagcttaataatagcgtgactgcaccatagcgtttcagccagccggtagctttctcttgccagcggcttgttttacgcaatggaaagaaacgcccaaggataacgttagttaaccctccaaggctattacccattgttgctgttaaaactaaaacccagggatgactgatcccggaaagcaacattgccaccagcacgacttcggagttgccgggtaatagtgtagcgctgagaaaactactggcaaacaagctgaaaaggcttaacgcttcactcacagcaagcgaacatccacggcgtccatgcctgctgcacgggccgcctgaataccgaaatcggcatcttcaaagaccacacactgcgtcggttgcacgcccatacgctgcgcgcacaacaaaaatgtgtctggcgcgggtttatggtgtttgacgtgatcggcagcgacgacggcgtcaaaataatggcgtaatcccaggtgcgccagcaatgcctcagcgatggcgctttcactccccgttcctacagccattgggcgacgaccatgccaacttttcaccacatcaacaagaggaagcggttcgacgctatccagcagcatacttcttactgcttctgttttttcacgcgctaacgcatgcgggtcgagatcggcctgattcagctcaataattgcctgagcaatacgccaggtggggcttccattaagcgcaatcatcgcctgaatatcgtactgaagaccgtagtgccctaatacttcgcgccacgctttacggtgcgtaggctccgtatccaggattgtgccatccatatcaaaaattaaacctgcataacgctcgtacatggtcttctcgcaagtcgaaaaatatgacgctactttagcgtaattgcttgattttgtcgctgatggcgaaggagaagaaaattcaggaaatggataaaggagttatttagaaatgagatatttttgaaggaaattttttggagaagatggtgcatccgggaggatgactcactgacgttcgcccttcgggccgttgctggcgcaacgttatccttcctggtgcctgcggttaataccgctatctcttcgataccttcattgctgaaggttacggagaatatggtgcatccgggaggattcgaacctccgaccgctcggttcgtagccgagtactctatccagctgagctacggatgcatcgggaaaacttattctactgctgatattgataccgctactaaagccatatcaattaagagatggtgcatccgggaggattactcgccttgcggctcgcccttcgggccgttgctaaagcaacgttatcatccctagtgcctgcggttaattccgctacctcttcgataccttcattgctgaagatttcggagaatatggtgcatccgggaggattcgaacctccgaccgctcggttcgtagccgagtactctatccagctgagctacggatgcatcgggaaatttattttactgctgatattgataccgctactaaagccatatcaagtaagagatggtgcatccgggaggattcgaacctccgaccgctcggttcgtagccgagtactctatccagctgagctacggatgcatcgggaaacttactttactgcagattttttgataccgctactaaagccgtatcaagtaagagatggtgcatccgggaggattactcgccttgcggctcgcccttcgggccgttgctaaagcaacgttatcctccctggtgcctgcggttattaccgccacctcttccataccttcatcgctgaaagtacgtagaatatggtgcatccgggaggattcgaacctccgaccgctcggttcgtagccgagtactctatccagctgagctacggatgcaaatggcggtgaggcggggattcgaaccccggatgcagcttttgaccgcatactcccttagcaggggagcgccttcagcctctcggccacctcaccacacgcctcttacgagtgcttcgaagaacttgtttatcgctcatcgtcgctgcgtggcgcacatattactttctgagacttataagtcaaacaatttttcctacacttttatcgtttgcacacttcacgttcaattagtctgtaaaaacgtcaaaaagagtgttttatcaacagaagaatggaggtctgacagatagtagtaatgcaaaaaaatggagacttaagttgaatgaacgggagtaaagcgaaaagactatagagtgaaggagaaattttgagggtgcgtctcaccgataaagatgagacgcggaaagattagtaactggactgctgggatttttcagcctggatacgctggtagatctcttcacggtgaacagaaacttccttcggggcatttacgccaatacgtacctggttgccctttacccctaaaactgtcacggtgacctcatccccaatcatgagggtctcaccaactcgacgagtcagaatcagcattctttgctccttgaaagattaaaagagtcgggtctctctgtatcccggcattatccatcatataacgccaaaaagtaagcaatgacaaacacattacatctaagcagtcatggcattacattctgttaaacctaagtttagccgatatacacaacttcaacctgactttatcgttgtcgatagcgttaatgcgaatgccgtgaagcgagtccacggcattgcctgacgcttatattattgcaatttcgcgctgacccagcctttcacactggctaacgctgcaggtaaggccgcagcatccgtaccaccggcttgcgccatgtcaggacgtccaccacccttgccgcccacctgctgagcgaccataccaatcagttcccctgctttcacacgatctgtgacgtccttagatacgcctgcaatcagagaaaccttaccttcgactaccgttgccagcacgataattgtgctccccagctgattttttaaatcgtcaaccatggtacgcaacattttcggctcaacaccgctaagctcgctaaccaacagcttaacaccattaacatcaattgccttactggaaagatttgcgctctcctgtgcggcagcttgttctttaagctgttgtaactctttttccagctgacgcgtacgttccagtacactgcgcactttatcagccagattattgctatcgcctttcagcagatgcgcgacttcgcttaagcgatcgctgtctgcatgaacggtggcgatagcaccttctccggttaccgcttcgatacgacgaacgcctgcagcagtaccgctttcagagatgatgcggaacagaccaatatcaccagtgcggctggcgtgagtaccgccacacaactcggtagagaaatcgcccatgctcagcacgcgtacgcgctcatcatacttctcgccgaacagcgccatcgcacctttcgctttcgccgcttcgagatccatgatgttggtttcgatcggcaaattgcgacgaatctgtgtgttcaccaggtcttcgaccgcacgaatctcttctggtttcatcgcttcgttgtgactgaagtcgaagcgcagcaccttgtcgttaaccagactacctttctggcttacatgagtacccagaacctggcgcagcgcagcgtgcatcaggtgcgttgcggagtgattcagacgaatacgggcgcgacgagcctcatcaacatcagcctgcaccgcgtcgcccactttcagagaacccgcagcaagtttaccgatgtgaccaatcgcctggccgtatttctgcgtatcttccaccgcaaaggagaagttagcgcctttcagttcgcctttatcgccaacctgaccgccggattccgcatagaatggcgtttgatccagcacgaccacagcttcctggcctgcattgatggcatcaaccgctttaccatcaacaaacagcgcagtcactttgccgttcagttccagatggtcatagcctttaaattcagatgcactgtcaacacggatcattgcgttgtaatcggcaccaaagccgctggcttcgcgcgcgcgacgacgctgctcttccattgcagcttcaaaaccagcttcgtcaactttgatgttgcgctcacgacaaacatcagccgtcaggtcaaccgggaagccataggtgtcgtacagacggaaagcagtttcaccatccagcgtatcaccagaaagttttgccagctcttcatccagcaacgccagaccgcgctccagagtacgagcaaactgctcttcttcagtcttcagcacctgctcaacctgcgcctgctggcgtttcaggtcttcacccgcagagcccataacgtcgatcagcggaccaaccagtttgtagaagaaggtttctttcgcgccgagcatattaccgtgacgcactgcgcgacgaatgatacgacgcagtacataaccacggttttcattggacggcattacgccatccgcgatcaggaacgcacaagaacgaatgtggtcagcgattacgcgcaggcttttattgctcagatcggttgcgccagtgactttcgctaccgcctggatcagcgtgcggaacaggtcgatgtcatagttagagttaacgtgttgcagcaccgcagcaatacgctccagacccataccggtatctacagacggcttcggcagcggttccatcgtgccatcggcctggcggttgaactgcatgaagacgatgttccagatctcaatgtagcggtcgccgtcttcttccgggcttcccggagggcccccccaaatgtggtcgccgtgatcgtagaagatttcggtgcacgggccgcacggaccagtgtcacccatctgccagaagttgtcagatgcgtatggcgcacctttgttatcgccgatgcgaataatacgttcgcgcgggatccctacttctttttcccagatttcgtaggcttcgtcgtcgctttcatagacggtaacccacagacgctctttcggcagggcaaaccatttttcgctggtcagcagttcccatgcaaactgaatggcatcgtgtttgaaatagtcgccgaagctgaagttgcccagcatttcgaagaaggtatggtgacgcgcggtgtaaccgacgttttccaggtcgttgtgtttaccacccgcacgcacgcagcgttgggaagtggtagcgcgggaataattacgcttgtcgagcccaaggaacacatccttgaactggttcatcccggcgttggtaaacaacaaagttgggtcgttatggggtaccagggagctgctggcaactacctgatgtcccttactatggaaaaagtcgagaaacgcctgacggatctcagcggtgctcttgctcataattatcctgaaatcaagctaacgaaatatcgccaccagctccagcgtgtcttaaccgccgggctggtaactgaaaagtgggaataagataagttttcttgactgggaagtaaaataccgtatgcgttcagtcggcaaaatttcgccaaatctcctggatatcttccatcagatagccacgatagagcagaaaacgctggatcttaactttttcactaaagacagttggcaaaggttcgccatattttcgcgtcgcctgatcgcgcgccagtgcgcaccagtcgatgtcacattcacgcatcgctttttctgtcgcttcgcgggaaatacctttctgattcagttcctggcgaatacgcgcaggtccataacctttgcggctacggctggcgataaagcgcgcaacaaatcggctgtcatcgagatagccatgttcatggcaccaggcaataacgcgctcgtaatcttctgccgtagcatcaatctcttctgggccatttttgcccataatcggtgccgcgagtttacgtcgcagttcttgctcactgtgatcgcgcaccgccagaatgcgtaccgcacgatccaacaggcgagcatatgccgggcgacgggatgtactttctgtcatggcatatccttacaacttaaaaaagcaaaagggccgcagatgcgacccttgtgtatcaaacaagacgattaaaaatcttcgttagtttctgctacgccttcgctatcatctacagagaaatccggcgtactgttcgggttgctcagcagcaactcacgtactttcttctcgatctctttcgcggtttccgggttatctttcagccaggcagtcgcattcgctttaccctgaccgatcttctcacctttgtagctgtaccacgcgcctgctttctcgatcagcttctcttttacgcccaggtcaaccagttcgccgtagaagttgataccttcgccgtagaggatctggaattcagcctgtttaaacggcgcagcgattttgttcttcaccactttcacgcgggtttcgctacccaccacgttttcgccctctttcaccgcgccgatacgacggatgtcgagacgaacagaggcgtagaatttcagcgcgttaccaccggtagtggtttccgggttaccgaacatcacaccaattttcatacggatctggttgatgaagatcagcagcgtgttggactgcttcaggttacccgccagcttacgcatcgcctggctcatcatacgtgccgcaaggcccatgtgagagtcgccgatttcgccttcgatttccgctttcggcgtcagtgccgccacggagtcaacgacgataacgtctactgcgccagaacgcgccagggcgtcacagatttccagtgcctgctcgccggtgtccggctgggagcacagcaggttgtcgatatcgacgcccagtttacgtgcgtagattgggtccagcgcgtgttcagcatcgataaacgcacaggttttaccttcacgctgcgctgcggcgatcacctgcagcgtcagcgtggttttaccggaagattccggtccgtagatttcgacgatacggcccatcggcagaccacctgccccaagcgcgatatccagactaaggctaccggtagagatggtttccacatccatggaacggtcttcacccaggcgcatgatggagcctttaccaaattgtttctcaatctggcccagtgctgccgccaacgctttctgtttgttttcgtcgatagccatttttactcctgtcatgccgggtaataccggatagtcaatatgttctgttgaagcaattatactgtatgctcatacagtatcaagtgttttgtagaaattgttgccacaaggtctgcaatgcatacgcagtagcctgacgacgcaccgcatcacggtcgccgctgaagcattcccgccgggtaatgccttcaccgcgggcagtggcaaaagcaaaccagacggtgccgacaggcttctcttcactgccgccatccggcccggcgataccactaatagacacggcataatcagcacgagccgctttcagtgcgcctatcgccatttccaccacgacgggttcactcaccgcgccatgctgcgccagcgtctcttcgcgtacgccgatcatctgcgctttggcttcgttactgtaggtgacaaatccgcgttcaaaccaggcggagctaccggcaatatcggtaatcactttcgctacccaaccaccggtacaagactcggcagttgttacggttgcgccacgggctttcagcgcctgcccaacctgttcacttaactgcatcagttcactgtcagtcatcacaacctctgtcagtcaaaaatttatgccggacaagatagcactttcgtcaggaagatggtgttggcgttgcaattttacgaggaggattcagaaaaaagctgattagccagagggaagctcacgcccccctcttgtaaatagttactgtactcgcgccagcgccacggcttgtcctaactgccagaccgccattgcgtaatgggtgctgtggttgtaacgggtgatggtgtagaagttcggcagaccgtaccagtactggtagccggtgccaacatccagacgcagcaggctggcttgttgatggttgcccagcggctgctgtggcgttaaacctgcggcggcaagctggctaatgctgtacttagttttgaagccatttggcaagcctggagcctgaccgtttgccattaccgcgacctgatcgcctttcacccagccgtgcgctttgaaatagttcgccacgctaccgatcgcatcaaccggatcccacaggttgatatgcccgtcgccgctgaaatctaccgcatattgtttgtaagagctcggcataaactgtccgtagcccatcgccccggcaaaggaacctttcagattgagcggatcgtcctgctcgtcgcgcgccatcaacaggaaggtttccagctcgccagagaaatactccgcgcggcgtgggtagttaaaactcagcgttgccagcgcatcgaggatgcgagttttccccatcacgcgcccccagcgggtttcaacgccgataatcccgacgataatttccggcggtactccatacacctgccacgcgcgattcaacgcatcttcatactgattccagaaaaccacaccgttctgcacgttgtccggcgtaataaattttttgcgataacggagccatgcgccgttcggaccacttggcggtttcacgcttgtggttggtgcctggttatccatcagccgcagtacgctatccagacgcttcgcctgggagagaatttcctgcaactgctgacgatcgaaaccgtgtttgttcaccattttgtcgatgaactgctgggcattcgggttattagcgaaatcgccgcccatctgcatcacattgtgctgcggctcaagcaggaagccgccagacggcgttccggtggtcgtatcagtctcagtaggttttggcttgctgctacaggcggcaagcaacacaaaaaggggaagcaatgttacataacgacgcttgaacatgaggggtccatttaacagattcaaccaggggcaagtatggtaaagcatcacgccccgcacaaggaagcggtagtcactgcccgatacggactttacataactcaactcattcccctcgctatccttttattcaaactttcaaattaaaatatttatctttcattttgcgatcaaaataacacttttaaatctttcaatctgattagattaggttgccgtttggtaataaaacaataaatcctgaaggagagaacaatgatagaaaccattactcatggtgcagagtggtttatcgggctgttccaaaagggcggagaggtgtttaccgggatggtgaccggcattcttccgctgttgattagcctgctggttatcatgaacgcactgattaattttatcggtcagcatcgtattgaacgttttgctcaacgttgcgccggtaaccctgtttcccgttacctactgttaccgtgcattggcacgtttgtcttttgcaatccgatgaccctaagcctgggtcgctttatgccggaaaagtacaaacccagctactacgcggcggcctcttatagctgccacagtatgaatggcctcttcccccatatcaaccctggcgaactgtttgtttatcttggcattgccagcggtctgacaacgctgaacctgccacttggcccactggcggtgagttatctgctggttggtctggtcaccaatttcttccgcggctgggtgaccgatctgaccaccgccatttttgagaaaaagatgggcattcaacttgaacaaaaagttcacctggcaggagcaacaagttgaaataacacctggcaggagcaacatcatgacgcatattcggatcgaaaaaggaacgggtggctggggcggcccgcttgagctgaaagccacgccgggaaaaaaaatcgtctatatcaccgccggtacccggcctgcgattgttgacaaactggcacagcttactggctggcaggctattgacggatttaaagaaggtgaacccgcggaggtggaaattggtgtcgcggtaatcgactgtggcggcacattacgctgcggcatctatccgaaacgacgtattcccaccattaatatccacagcacgggcaagtccggtccgctggcgcagtacattgtggaagatatttatgtctctggcgtaaaagaagaaaacatcactgtagtaggtgatgcgacaccacaaccctcttccgtgggccgtgactatgacaccagtaagaaaatcaccgaacaaagcgatggtttactggcgaaggtgggaatgggcatggggtccaccgttgcggtgctgtttcaatctggtcgtgacaccatcgacactgtattaaaaaccattctgccgtttatggcattcgtcagcgcgctcattggcatcattatggcttctggccttggtgactggattgcccacggtcttgctccgctggcgagccatccactgggtctggtcatgctggcgctcatctgttccttcccactgcttagtcctttcctcggcccaggcgcagttatcgcacaggttatcggcgtattgattggcgtgcagattggtctcggcaatattccgccgcatctggctttaccggcactgtttgccatcaacgcgcaggcggcctgcgacttcatcccggtcggtttgagcctggcggaagcccgtcaggacacggttcgcgtcggtgtcccttctgtactggtgagccgctttttaaccggcgcgccgactgtactgatcgcctggtttgtctccggttttatctatcaataaaggctgaaacatgaccgttatttatcagaccaccatcacccgtatcggcgcgagtgccattgacgccctcagtgaccagatgctcatcacctttcgtgaaggcgcgcctgcggacctcgaagagtattgcttcattcattgccacggcgagttgaaaggtgcactccatcccggtttgcaatttagtctcgggcagcatcgctatccggtgaccgctgttggcagcgtggcggaagacaaccttcgcgaactgggtcatgtcaccctgcgcttcgatggtttaaacgaagcggaatttccgggcactgtccatgtggcaggccctgtccccgacgatatcgcgccgggaagcgttttgaagtttgaatctgttaaggagtaaaaaatgaatcaggttgccgttgtcatcggtggtgggcaaaccttaggcgcgttcctgtgccacggtctggctgccgaggggtatcgcgtcgcggttgtcgatattcagagcgacaaagccgcaaatgtggcacaagaaattaacgccgaatatggtgaaagtatggcgtacggttttggtgctgacgccactagcgagcaaagcgttctggcgctctctcgtggggtagatgaaatctttggtcgcgtggatttgctggtctacagcgccggaatagcaaaagcagcctttatcagcgacttccagctcggcgattttgaccgtagcctacaggtgaatctggtgggttatttcctgtgtgcgcgtgaatttagccgtttgatgatccgcgacgggattcaggggcgcattattcagatcaacagcaaatccggcaaagtgggcagcaaacacaactctggctacagcgcagcgaaatttggtggcgtcgggctgactcaaagtctggcgctggatctggcggagtacggcattacggtgcatagtctgatgctcggtaacctgctgaaaagcccgatgttccagagtctgttgccacaatacgcgaccaagctgggtatcaaaccggatcaagtcgagcagtattacatcgacaaagtaccgctcaaacgcggctgcgattatcaagatgtgctgaatatgctgctgttctacgccagtcctaaggcgagctactgcaccggacagagcatcaatgtcaccggcggtcaggtgatgttctgatcaacagcggagatccattaaggatctccgtgagactatagaatgcctgatgcgctacgctcatcaggcatacaggacttccgccactacattaaggaaaagttatggtatccgcactcatcaccgtcgccgttatcgcctggtgtgcgcaactggccttaggcggctggcaaatttctcgttttaaccgtgccttcgacacactatgccagcaagggcgggttggcgtgggccgttccagcgggcgctttaaaccgcgggtcgtggtcgccatcgcgctggacgatcagcagcgcatcgtcgacaccttgtttatgaaaggactgaccgtcttcgcccgaccgcaaaaaattcccgcaattaccggtatgcatgcgggtgatttacagcccgatgtgatctttccccatgatccactaagtcagaatgctctaagtttggcgcttaaactgaaacgtggataatttcgttgtgaatgttacttgcttgcgaagttatcattttgaaacctaaatcaggtaatcacgcccatgaaacctcgtcagcgtcaggccgccattctggagtatctgcaaaagcagggtaaatgcagcgttgaagaattggcgcaatactttgacaccacaggcacaaccattcgcaaagatctggtcattctggaacatgccggaaccgtcattcgtacttatggcggagtggtgttgaataaagaggaatccgatccgcctatcgatcataaaacactcatcaacacccacaagaaagagctgattgcagaagctgccgttagttttatccatgatggcgatagcatcattcttgatgctggcagtaccgttttgcagatggttcccctgctcagccgctttaataacatcacggtgatgaccaacagcctgcatatcgtcaatgcgctatccgaactggataacgaacaaactatcctgatgccaggcggaacgtttcgcaaaaaaagcgccagttttcacgggcaactggcagagaatgccttcgagcatttcaccttcgataaattgtttatgggcaccgacggcatcgatctcaatgcgggcgtaaccacctttaacgaggtttataccgtcagtaaggcaatgtgcaatgccgcgcgcgaagtgattttgatggcggacagtagtaagtttggccgtaaaagccccaacgtagtttgcagtcttgaaagcgtcgataagctgattaccgacgcaggtatcgatccggcgtttcgtcaggcgctggaagagaaagggatcgatgtgatcataaccggagagagcaatgagtgaagcactactgaacgcgggacgtcagacgttaatgctggagttgcaggaagcaagccgtttaccggaacgtctgggcgatgattttgttcgcgccgccaatatcatcctgcactgtgaaggcaaagtggtggttagcggaattggcaaaagcggccacattggtaagaaaatcgccgcaacgcttgccagtaccggcactccggctttttttgtccatccggcagaagcgctgcacggcgatctggggatgatcgaaagccgcgatgtgatgctgtttatctcttactccggtggcgcgaaggaactggatctgattattccgcgtctggaagataaatctatcgcgctgctggcgatgaccggcaaaccgacgagtccgctgggcctggcggcaaaagcggtgctggatatctccgtagaacgcgaagcctgcccgatgcaccttgcgccgacctccagcaccgtcaataccctgatgatgggtgacgcgctggcgatggcggtcatgcaggcgcgcggatttaatgaagaagattttgcccgctcccacccagccggggcactgggcgctcgcttgctgaataaagtgcatcatctgatgcgccgtgacgatgccatcccacaggtggcgttaaccgccagcgtgatggatgcgatgctggaactcagccgcaccggtctggggctggtggcggtatgtgacgctcaacaacaggtacaaggcgtctttaccgacggcgatttacgtcgctggctggttggcggcggcgcactcaccacgccagtcaatgaagcgatgacggtcggcggcaccacgttgcaaagccaaagtcgcgccatcgacgccaaagagatcctgatgaagcgcaaaatcactgccgcaccggtggtggatgaaaacggcaaactcaccggcgcaataaacctgcaggatttctatcaggccgggattatttaatccttcaatcccagacgtttcgccagccgatgcaggttggcgacgtcggtttccagcatccgcgcgcaggcagcccagttgtgatgattttgtgccagtgcctgacgaatagtttcacgctggaacgcttctgtcgcttcacgcaggttttgcttaacaacgggcaccgccgccacttctggcgtcggcaacgtcacctcaggaaaagcaaaatgttgcgcctcaagaatcacttcatcgccgctgcgggtggctctcgccagaactaccgcccgatgaatagcatgttccagttcgcgcacgtttcccggaaaactgtagtgttgcagtaaatttcgcgctccggcacttaataccacgcgggagagcccctgccgcaaacgacactgctcgcagaaataccccgccagcagaatgacatcatcgccccgctcacgcagcggcggcacgctaagtggaaacacgctcaggcgatgaaacaaatcggcgcggaatcgccctgccagcacctcttcgcgtaaatcgcggttagtcgccgccagcacgcgcacatcgacccgcaaacaacggtcatcgccaacgcgctgaatatcgccatactgcaacaccctcagcagcttggcctgcaatgccaagctcaactcgccgatctcatccagaaacagcgtgccgttatccgccatttcaaacttcccgctgcgattactgatagcgccagtaaacgctcctttcacatgcccgaacaactcactttccgccacactttccggcagtgcagcacagttgagatagaccagcggattcaccgcccgtgggctggcttcatgaatcgctttcgccaccagctccttaccggttccagtctcaccgctgatcaggacgttgagatcggacgccgccacaatctcaatctcttttttcagttgcgtcatgccaggggacaagccaatcatctgcgtctgtttcaccgcttcaaacggcgtggcatcgcctggcagcatattctggctttccagttgttcaatcagcaacgcattgcttaacgctcccgccgccagcgcagcaatcagccgtagctcttcgtcgctgaaaacatcgaactgatcgggctgcatcccgtcgagcgtcagtgcgccgatcaggttttgcccggcaaacaatggcagaccaacgcaggcgtgaaccttcagactctcctgcccaggaatcaaaccgtcatagggatcgggcaattcgctgtctgcgggaaagcgcaccacatccccggcgcgggcaatcgcttccagccgtggatgcccttccagcgcaaagcgtctaccgagtacatcctttgccagaccgtcgatggcaagcggaataaactgccggctatcgtaacgtagcaacgcagacgcatcgcactccagcacctgacgtagcgtggtgatcaggcgctgaaaacgatcctggtgaccaatcccacgctgcaattcgatggcgatattcgccagcacatcaacggaaaaactcatctttgcctcactgtcaatttgactatagatattgtcatatcgaccatttgattgatagtcattttgactactcattaatgggcataattttatttatagagtaaaaacaatcagataaaaaactggcacgcaatctgcaattagcaagacatctttttagaacacgctgaataaattgaggttgctatgtctattgtggtgaaaaataacattcattgggttggtcaacgtgactgggaagtgcgtgattttcacggcacggaatataaaacgctgcgcggcagcagctacaatagctacctcatccgcgaagaaaaaaacgtgctgatcgacaccgtcgaccataaattcagccgcgaatttgtgcagaacctgcgtaatgaaatcgatctggcggatatcgattacatcgtgattaaccatgcagaagaggaccacgctggggcgctgaccgaactgatggcacaaattcccgatacgccgatctactgtacagccaacgctatcgacagcataaatggtcatcaccatcatccggagtggaattttaatgtggtgaaaactggcgacacgctggatatcggcaacggcaaacagctcatttttgtcgaaacaccaatgctgcactggccggacagcatgatgacttacctgacaggcgacgcggtgctgttcagtaacgatgctttcggtcaacactactgcgacgagcatctgttcaacgatgaagtggatcagacggagcttttcgagcagtgccagcgttactacgccaatatcctgacgccgttcagccgcctggtaacaccgaaaattaccgagatcctgggctttaacttaccagtcgatatgatagccacttcccacggcgtggtatggcgcgataacccgacgcaaattgtcgagctgtacctgaaatgggcggctgattatcaggaagacagaatcaccattttctacgacaccatgagcaataacacccgcatgatggctgacgctatcgcccaggggattgcggaaaccgacccacgcgtggcggtgaaaattttcaacgtcgcccgaagcgataaaaacgaaatcctgactaatgtcttccgcagtaaaggcgtgctggtcggcactagcacgatgaataacgtgatgatgccgaaaatcgccgggctggtggaggagatgactggtttacgcttccgtaacaaacgcgccagtgctttcggctctcacggctggagcggcggtgcggtggatcgtctttccacgcgcctgcaggatgcgggtttcgaaatgagccttagcctgaaagcgaaatggcgaccagaccaggacgctctgaagttatgccgtgaacacggtcgcgaaatcgcccgtcagtgggcgctcgcgccgctgccgcagagcacggtgaatacggtagttaaagaagaaacctctgccaccacgacggctgacctcggcccacggatgcagtgcagcgtctgccagtggatttacgatccggcaaaaggcgagccaatgcaggacgttgcgccaggaacgccgtggagtgaagtcccggataacttcctctgcccggaatgctccctcggcaaagacgtctttgaagaactggcaagcgaggcaaaatgagtaacggcattgtgatcatcggtagcggcttcgccgcccgccaactggtgaaaaatattcgcaaacaggacgccactattccattaaccctgattgccgccgacagcatggatgagtacaacaaacctgacctcagccatgttatcagtcaggggcaacgtgccgatgaccttacccgccagacggcgggtgaatttgccgagcagtttaatctgcacctgtttccacaaacctgggtgacggatatcgatgccgaagcccgtgtggtgaaaagccagaataatcagtggcaatacgacaagctagtactggcaaccggtgccagtgcctttgtcccgcctgtgcctgggcgtgagttaatgctgacgttaaatagtcagcaagagtatcgcgcctgtgaaacgcaactgcgggatgcccgacgcgtgttgattgttggcggtggtttgattggtagcgaactggcgatggatttttgtcgtgcaggcaaagcggtcacgctaatcgacaacgctgccagtattctggcgagcttaatgccaccggaagtaagcagccgcttgcagcatcggttgacggagatgggcgttcatctgctgttgaaatctcagttacaggggctggaaaaaacggattctggcattcaggcaacgctggaccgccagcgcaatatcgaagtggatgcggtaattgccgccaccggactgcgcccggaaaccgccctggcacgacgcgccgggctgacgattaatcgcggcgtttgcgtcgatagttatctgcaaaccagtaataccgatatttacgcgctgggcgattgcgcggaaattaacggtcaggtattgccgttcctccagccgattcaacttagcgcgatggtgctggcaaaaaatcttctcggcaataacacgccgctgaaactcccggcgatgctggtgaaaatcaaaacgccggaattaccgctgcatctggcaggcgaaacccagcgtcaggatttacgctggcaaattaataccgaacgccagggaatggtggcgcgcggcgttgacgatgctgaccagcttcgcgcctttgtggtcagtgaggatcggatgaaagaggcatttggattgttgaaaacattgccgatgtaagtgggctactgtgcctaaaatgtcggatgcgacgctggcgcgtcttatccgacctacggggacgcatgtgtaggccggataaggcgtttacgccgcatccggcaatggtgtccaaatgcaacacgttttatccgttctggacttcacccgctaaccaacgcgccgcagcaataaccccctgccccagagacaaaccgccatcacccgccggtaaactctgtggaaagagcaatgtgaaatcagcgagataatgcgccagacgtgcacgcagcaaacggttatgaataaccccgccgctaaataccagcgtagtgataccacgcatcgtggcctgctcacgcatcaacgcggcaaaaccctgcgccagcgtatcatgaaacgcccacgcgcgttgattaaccggtgcctgccagttcagccactgctgccagaaagtggcgagatccagttgattgtccacccgcggcattgtcaccggatgcgtcactccgtggcaactggctgcgagcgcctccagagcacaagccgcttcaccttcataacttaacgtggctggcgcacagcccagtgccgccgccactgcatcgaaaaaacgcccacagctactcgccagcggcgcgttaattccacgctcaatggcccgcgccagcacgctccagttttgctgttgcacacttgctgtttcagagtaattctgccactccggcacaaagcgcaggcactgcgccagcaggtttcgccacggctgcttcgctgccaaatcgccacccggaagcgccactgcaggcaagccgcccaggtgctcacattcgcgatagttcacccgcaggcactcgccgccccacaaagcgccgttctcccccataccgataccgtcgagcgtcaaagcaatgacatcaccgccatccagcggccactgatgctctgccagacacgccgctgcatgggcatgatgatgcagtaccgtttgcgtcggcagattcatttcacgcgcccactggctggagacatagcccggatgcgcgtcatgcacaacgtattgcggggtaaaatcgtagatgttttgcatcaggcgtaacgcttcgcgccactgcatctggatgccatcgtcacttaaatcgcccagatgctgactcaacaccgcttgttcaccgcgcaccaggcagaaggtatttttcagatccgcgccgagacacagcacaggcggaacatttttaaagcccggaggcaaagccagcgcatccggcacatacccccggctacggcgcagcatttcgccgctttcgcgcaccacgctatcatccatccgctgcacgatgtcgcggttatgtatcaagaatccgtcggcaatgccctgcaaatccgccagcgcctgttcgttgctgatagctggtggtttaccgctcaggttgccggaggtcatcaccagcgggcattgcagttcctgtaacagcaaatgctggagcgggttcgcaggcaacattaccccgacttcgttaaggtcaggggcgatatcatcacaaagctcaggaacgtattttttatccaccagcacaatcggcgcggcgggcgtggtaagcaactggcgcgcagcgtctggtaaaccgtcagccactggcaacatgaccgccagcggtttcgccgggcgatgtttgcgcgcccgaagtgtcgccaccgcgttactgttacgtgcatcgcaggcaagatgaaatccgccaatccctttgatggcgacaattttgcccatttttaactgtgcgatagctgcctgtaatgccgcctcttgttccgcatgttcaccatgacttacccattcaagatgcgggccacactccgggcaggccaccggctgggcgtggaagcgacgatcgagcgggtcacggtactctttgtcacaggccggacatagcggaaacgccgccatcacggtaaacgggcggtcgtaaggcatggcgcgaataatggtgaaacgcgggccgcagtgggtacagttgataaacggataacgataacgccgttcgcctggggtattcatttcggcaaggcaagcagggcaagtagcggcatcgggaacaatttgcgtattcatggtgccgcctgtgctctggcgtatagtgaactcggtgggcagttgactccagataaacggctcacgctcgacgctatcaatacgcgccagcggcgggcagtgctgatacaattgaacaagaaacgtttccgggtcttcccgcagccggacttctacgccatcgccgtcattacagacatcgccgtgaagatttaattgctgtgccagctgccagacaaacggacgaaaaccgacgccctgcactttgccacgaatacgcagttggacaccgcaagatgtgttttttgccattgagttattcccgccatcatgaattgcgtaacccgccctgccggacacgacagcgtcgcatccggcagtcacaggtcggcgataccgcccgctccgtattctacgaatatttccgggaattcctttgatgccagaacagttctgtaagatttttagaacatcagcgccgtacggcggcgtttttctgcgctcagttgttcaagtttattacgatcgacacaaatcagcgcatgagtcgggcaagccgccatacacgccgggccgtcttcacgatggttgcacaggtcgcatttattggcttcggctttgtcagcccgtacattcagacccgcgccgctgttgcggatcaccggacgtaccaccacttccatcgcaccatacgggcaagccacaacgcaggttttgcaaccaatgcaacgttcctgcatcacatgaacaaaccctttatcacggctgatagcaccattcgggcagacgttagcgcacggtgcatcttcacactgacggcaaactgtcgccgtggaaatgttcacacctttaatgacatggatacgcggtaaaaaagtttccggggtcaggcttgcacagtcctgattttcctgatgagaaaccacgcacgctacttcacaggtacggcaaccaatacatttactcgcgtcagcaatgatgaaacggttcatcaaattctccagcaatgacagttaatgcgccgatacattcacaaatcatgccagtttttaatttactgttatttaaggaaattaatttctgtaatgcaggaaaaacgatgtcatcgacactagtgacgatgacatgtgatgacaatgtttatcggctaggagcaatgagactgtcgcggcggatcagttttccgctgaaggttttcggcggactgaaatccccgccatcgagcataaaaatcagccgtccaataatttcctgaatcatctcagtcaccggaatttttacgctggagagcgccggaacggtgtagggggcaatagcgatatcatcgaatccgataacactcacctgctctggcaccgctacgccgcgctcgtgtaacgctttcatcgcacctatcgccatatcgtcgttactggcaactaacgcgctaaatttagccccacgttcgagcaacatttctaccccttcggccccgctggcaggcgtccatttaccgttagcgataagtttttcattgagcgcaataccatgctgcgccagcgcgtctttatacccggcaagacgttcaatgttggtgggggaatccatgctgccggtaaggaaagcaatctcctgatgcccggcgtttatcaactctgccacggcgttaaaactggtctgtttatgatcgcaccagacgctatggctgctgtttttgcgcaggcggcgattaagcaccattatcggctgactgtgcgcgtcaatgatgtcatcgatctcatccacgcttaaaaaacgcgggtaaatcatgatcgcgtcgcagcgcagatccagcagatactgaatcgcctggcgctcttcttctgcgctgtgtttaccatctgccaatagcaactgccgccctttctcttccgccattcgcgcggcatgaaagagtaattcactaaaataaatgccgtggtaaagcgtgttggtcactaccagccccagcgtctgagtactcttcgcgctcagattgcgcgccagcaagtttggacggtaaccgctctcttctaccgcctgaaacacgcgatctttagtctcctggctgacgtagccattaccactaagcacgcgggaaacggtcgctttactaaccccggcgcgcttcgccacttccagcatcgtcgtcatcattttcatccctttacacgcaatcaacgcagtgtactgcaccgtttgccgattgtccttgcacaatcggcgggaaaaatattcaggtgaccggtttcacaaatataaaaaatgaacaattcactctcttgcttatttagtgacaactattcatgattttgtgaaaccggtttcttaattccgtttcagcatcggcatttttccgtcacgtcgactgataacaactacatctaccctactgataacaggataaaatccgatggccaaaaattatgcggcgctggcacgcagcgtgatagcggcactgggcggcgttgataacatcagcgcggtcacgcactgtatgacgcggttgcgctttgttatcaaagatgatgcacttatcgacagcccgacgttaaaaaccatccccggcgtgctcggcgtggtacgtagtgacaaccagtgtcaggtgattatcggcaataccgttagtcaagcctttcaggaagtcgtcagcctgctgccgggagatatgcagcccgcacagcccgtgggtaaacccaaactcacgctacgtcgcattggtgcggggatcctcgatgcgctgatcggcaccatgagtccgctgatcccggcgattatcggcggaagcatggtcaaactgctggcaatgatcctcgagatgagcggcgtgctgacaaaaggaagcccgaccttaaccattctgaatgtgattggtgacggtgctttcttcttcctgccgctgatggtcgcggcatctgccgccatcaaatttaaaaccaatatgagcctggcgattgccatcgcgggtgtgctggtacatccgagttttattgaactgatggcgaaagcggcccagggtgaacatgtcgaatttgccctgattccggtcaccgcggtgaaatacacctacacggtgatcccggcgctggtgatgacctggtgcctgagttatatcgaacgctgggtggacagcattacaccggcggtgaccaaaaacttcctcaaaccaatgctgattgtgttgattgccgcaccgctggcaatcctgctgattggcccgattggtatctggatcggtagcgccattagcgcgctggtttacaccattcatggttatctgggctggcttagtgtcgccattatgggcgcgctgtggcctctgctggtaatgaccgggatgcaccgcgtctttacgccaaccatcattcagaccattgccgaaaccggcaaagaagggatggtcatgccgagtgagatcggcgctaacctgagcctgggcggtagtagtctggcagtggcgtggaaaacgaaaaacccggaactgcgtcagacggcgctggctgcggcggcaagtgccattatggcggggatttccgaaccggcgttatatggcgtggcgatccgcctgaaacgtccgcttatcgccagtcttatcagcggttttatttgcggcgcggttgccggtatggcggggcttgccagccacagtatggcagcgccggggctatttaccagcgtgcagttcttcgatccggcgaatccaatgagcatcgtctgggtgttcgcggtcatggcgctggcggtggtgctgagctttatcctcacactgttgctcggctttgaggatattcctgttgaggaagcggctgcccaggcgcgaaagtatcagagcgtacaaccgaccgtcgccaaagaagtaagtcttaattgaggatgaaaatgagtgtatttccagaaagttttttatggggcggcgcgcttgccgccaaccagtctgaaggtgcgttccgtgaaggtgacaaaggtctgaccactgtcgatatgatcccacacggcgagcatcgaatggcggtgaaactggggctggaaaaacgttttcagttgcgagatgacgagttttatcccagccatgaggcgacggatttttatcatcgttataaagaagatatcgccctgatggcagagatgggattcaaggttttccgtaccagtattgcctggagccgtctctttccgcagggcgatgaaatcacgcccaatcagcagggcattgctttttatcgttctgtctttgaagagtgtaaaaagtacggtatcgaaccgctggtcacgttgtgccacttcgatgtgccgatgcatctggtcaccgaatatggctcctggcgtaaccgcaagctggtggagtttttcagccgctacgccagaacctgctttgaagcatttgatggtctggtgaaatactggctaaccttcaatgaaatcaacattatgttgcatagcccgttctccggcgcgggtctggtgtttgaagaaggtgaaaatcaggatcaggtgaaatatcaggccgcgcatcaccagctggttgccagtgcgctagccaccaaaatcgcccatgaggttaacccgcaaaatcaggtgggctgtatgctggcgggcggtaacttctacccttacagttgcaagccggaagatgtctgggcggcgctggagaaagaccgggaaaacctgttttttatcgatgtgcaggcgcggggcacgtatccggcttactctgcccgcgtattccgcgaaaaaggggtaaccatcaacaaagcaccgggcgatgatgaaatcctgaaaaacaccgtcgattttgtctctttcagctattacgccagccgctgcgccagcgcggagatgaacgccaacaacagcagtgcggcgaacgtggtgaaaagcctgcgtaatccgtatctacaggtgagcgactggggctggggaattgatccactcggtctgcgtatcaccatgaatatgatgtacgatcgttatcagaagccgctgtttctggtggaaaacggcctgggcgcaaaagatgaatttgctgccaatggcgagattaacgacgactatcgcatcagctacttacgcgaacatatccgcgcaatgggcgaagcgattgcagacggcattccgctgatgggctacaccacatggggctgtattgatttagtttccgcctctacgggtgaaatgagcaaacgctacggctttgtctttgttgaccgtgacgacgcaggcaacggtacgctgacgcgcacgcgtaagaaaagtttctggtggtataaaaaagtgattgccagtaatggggaagatttagagtaagtaacagtgccggatgcggcgtgaacgccttatccggcctacatgtcgcacgaaccatgaaggcccgataagcgcagcgcatcgggcaatttagcatttggcatcagagctggttcaccccatcaagaacatccctgtcctgattccttaatgaaaaattactcttcttccaccgctaactgcgcgaagccgccatttccttcccagccttccagtcgttgataaacggtttctaccgcatctttaatcggctgggtcatcgggtagtaaaagccgacgatatccggctgaatgccgaggaaaatcacttcgccaatatcttctttcaactggtcgataaggtaattcaacggcatgttatgggtagtcatcataaacatctcggcgatatcatccgggtcgatgatgcggatctcgccggggtttagccccatatccgtggcgtcgacaatcagcagtcgtgtcgggcgcagttcacggatagcgacgatgtcgttttccggtgcgctaccgccgtcaatcaccacccagttacctttcggcgcggcggcgcacttttccgccagcagcggacctgcgccatcatcgcccatcatgctattgccaacacagagtaaaacgtcagtcacgcagtctcctcaccatcaaatagatggcgttttcctgatgaatatcatgcagcatacttaacagcattgtactccattcctgctgctggctagtttgcgctgcccgggctttatcgaatgcgttggccagcatcggcacatggttaatgtcgatgacgatctcaccatatttcggcacgccttccattttgcggcgggcttcactgcctgcctccagagtggcaatccatgccagatattcatcccacgggcaggtgagcgccgcttccaggcaatcgataaccccaaggtggtgaccaatcgccaggctgtaatagaccacctgctgcgcctcggcgggcgtggcatcgttctcatcaataaatttatggctcagttgactgaacaccaccttttcactcatcggatacgcgcctcttcaacaacatgattcagatggctgacaatctcgttcagacgcggatcgttttccgcttccagccagcgtgcaacctgttcttcgccctgccctaactgtgtaaggtaatcatcggcaatctgacgaccgtaacgataacccgccaggcgacgtgcttcgcgatccactttcacgcgcagcggctgcaccatatcaccatgcaggatctccgccggttgttcatccagttcacccggcccacgggcgtgaattttctgctccagcaggccgagcgccattgcaaagccgtacagcgtggcggcaggcgttggcgggcagccagggatataaacatccacagggacaattttatccgtaccgccccacacgcagtagagatcgtggaagatcccgccactgttaccgcaggcaccgtaggagatacaaattttcgggtccggcgcggactgccacgcacgcagcgcaggggatcgcattgcacgggtgaccgcgccggtaaacagtaaaatatccgcatgacgcggactaggaacgactttaatgccgaagcgttctgcatcaaacagcgggctaagcgtggcgaaaatttcgatttcgcaaccgttgcagccgccgcagtccacgcggtaaacataggcagaacgtttgatttttttcagtaagctcgccttcatgctggcgatggattcatccaccgtcatggggaccggaatgccgttggcgtcacgggggcctaataaattgctcatcagatggcctctttcatatggcgagtcagttcaatacggtcggacggcaccaggcatttctggcgcttacattccgggcaagtctcaaagctttcgcggtggttttccgcgcggctgtcgccgttgtgcttaagcagcgcaatggcgtagtcgatctctttctggacggcgaaaggacgattgcagacgcggcagttgcacagcgcgaagcgggactgttgcaggaagtcttctttcttccacaccgccagttcgtactcttggctcagtttgatcgccgccgtcgggcagacttcttcgcagcgtccacagaagatgcagtgcccaagattaaactcccaggcaagctctcctgtggcgaggtcagtttcaaccgttaaggcgttactcgggcaggcattgacgcaggccgcgcagccgatgcactgctgcgggttctgctctggcttaccacggaagtttttatcaaccgcaatcggctccagcggataagagctggtcgccgtgccggttttgatgacttttttgataaaggtaaacatggcgattccttatttcagcgggctgtttttacgctcaatgctgtaacgctcgagttctttgtacggcaccactttgctcttcttcttacgcacatcgaccacggtcatgcggtcggtacaggagtagcaagggtcgaggctaccgataatcagcggcgcatcggaaacggtgttgccgcgcagcatgtagcgcagggtcggccagttcgcgtaggtcgcggcacggcagcgccagcggtacagcttctggttgtcgccggtcatgctccagtggatatcatcgccgcgcggcgcttcggcaaagcccagcgcaaagcggtgcggaatgtaggtaaagccttccaccatcagtgggccacccggcaggttatccagaccgtagtcgatcatgttcagcgcggtatagacttcgttgatacgcactttcagacgggaaataacgtcgcagccctgctcgctgtggacttccattggcagcaggccatagccgacaaacgggtgatcggcgcgggtatcacgggcgtgaccgctggcacggaccatcgggccgacgttactgaagtcgcgagcgatttccgggtccagacgaccaatgccgacagtgcgctgttccatgttcggagtgctcagcagcacatccaccagctcctgcacttcacgacgcatctgttgtgccagctggcgggtctggatcatgtcgtctttcagcagatcgcgacgaatcccgccgatcaagttcaggccgtaggttttacgcgcaccggtaaggatctctgccattttcatggaggtttcacgcacgcggaagaactgcataaagccggagtcgaagccggtaaagtgacaggccaggccaaggttgagcagatggctgtgcaagcgttctacctccagcagaatggcgcggatcatctgcgcacgttctggcacctgaatacccatcgcgttttccacgctcgtggtgtaggcggtgctgtgggcaaagccgcagatcccgcacacacggtcagagaggaaggtcacttcgttataacccatacgggtttccgccagtttttccatgccgcgatggacgtagaacagacggtagtcggcgtcgataatgttttcgccatcgacgaacagacggaagtggcccggttcatcagaagtgacgtgcagcggaccaatcggcacgacgttgtttttcttgtcgcccagttcgttgatgaactcgtaggtttcagcatcggtggtcggtgccggacgctgacgataatccatgctgtctttacgcagcggataaagttcatccggccagtcatccggcagcaccagacgacgttcatccggcagaccaaccggaatcaaaccgtacatatcgcgcacttcacgctcgccccacaccgccgccggaacgcgcggcgtcacggacggatattccggtttgttggcgtcaacttcgacgcgaaccgtaatccaacacttagtgcccttctccatgctcagcacgtagtaaacggcgtaatgaccattcagtttgcgttcgtcgttaccaaacagcacgctcagccagccaccctgtttgtagtaaagaaactccaccacttccggcaggtagttcacctttacggtgacagtcagctgatctttggtctgccaggcgtggtccagcacgacgcccggaaatgcctcattcagcgcggcgagataatgttgacctaatttttcttcagacatgctcaaactctctttaatcacgccgccagcaaggagacgaacgctaaaaatgcaaagccaaacccagcccaggtaatgcgcggagtaatatcaagacgcagacgggccatgctgttttcgaacagcgcgataaccaggacgccgaccaccagttttacgatggcaatcaccagcgccagcagcagtccaccggcggtgaaggtttccatttgtccccacggaataaacaccccgacgaacatctgcaacaccaccagctgtttcaggctgataccccatttcatgacgccaaagccgctgccgctgtattcagagagcgggccttcctgcagctcctgctcggcttccgccaggtcgaacggcagtttgcccatttcgataaaggtggcgaacgcacaggcacaaagcgccagtaccagcgggatgctctggctcagcggccagtgataaacggtgtcggtgatgttgctgatgttggtggaaccggcaacctgtgcggcaacccacagaccaagcagcagcatcggttcgaccagcacgccaagcatcgcttcacggctcgcgccgatagcggtaaacgggctaccggtatccagaccagaaatggcaaagaagaaacgcgcgatggcaaagagatacagtaaggtgatcaaatcacccagttgcggcagcggagaaccgacggtcaccaccggcagcgcagtagcgatagtcagcatgacgcccaccatcacatacggcgtcaggcggaacacccagccggaggcatccgggccgacgctctgacgccccagcagtttgataatgtcgcgatactcctgcaacacgcccggcccgcgacggttatgcaagcgggcgcgcgccacgcgggttataccggagagcagcggcgcaacggcaaataacaccagcgcctgaattaacggatataaaacactcattctcaggctcctcgactaacaataatcaccaccagtaccgccagttcaaccagcgccatccggcggaacagcaacgcactcccctcgcactgccagcccggcaccagagacaccggattcagccatttgcgtagtttcagcaccggcgcaaacgcctgtttcaccggcatggcaaaaccgtgagcggtaatcaccatacttttttcgtggtcgtaaccgcacacccaggccgcaccgcgggaacggcttggcaaacgatcgcctttgcaaatcgccataatgatgaatggcagcagcgggcaggcaatcagcagcaacgtgatcatcggttgagaaacggtggtgttagcaggctccagcggcagaggtacagcagcagagagcatcggcagtagccacggcgcagcaacaccgccaattacgcagcaaatcgccagtgccactacgcttacgctcatcaggagcggcgcacaggtggcgttttcggcttctttggtgcgcggcgcgccgaggaacgtgacgccatagactttcgccatacacatcaccgccagcgcaccggtaattgccagccccacagcgagcagcggccccagcagacgggcaacaaacgcgccactattgctcagtttgaaaaaactttgatagataacccattccccggcaaaaccattcagcggcggcagcgcagccattgccatcagcccgactaacatggcgatggagataaccggcattttcttgccaataccaccgagtttttcgatatcgcgatgaccggtacggaaccagacgctccccgccccgaggaacagtacgcttttgaacaggctatggttaagcagatggtacagaccaccgaccaggccaagagcaatcagcgccggttgttcgagcgcgatacccgttacgccagcgcccagccccagcaggatgatgccgatattttccagggtgtggtaagccagcaggcgctggatgttgtgctccaccagcgcatacagaccaccgacaaacgcggtgatcatgccgagcaccagcagcgcgatcccccaccacagcggtgcattaccgcccagcagactcagggttaaaatgcccagcaggccaattttcatgactaccgtagaaaacaacgcggcagctggcgcagaggcgttcgcatgtgcctgcggcacccagccgtgcagcggaataatcccggccagcaggccaaagccaatcactccgagcagccagatatcggaaccgagcggcagctgttgcatacgcatatccagcaggcgcagatccagcgtgccgtaacgctgccacagcagccagcaagcaatcgccagcagcagagtgccaagacgccccagcgcaaaccacagtttgccctctttgctgttgctggtgaggaacaccgcgcacagggccatgatttcggccattaccacgaacatgccgaggttgctggcaatgacggcgcagacggcggcagccatcaacatattgatctgcaagccgttgcacttcacctgcgcgtggcgatgccagtcaatgttgtagaggctgacaaacagaccgcacagaccgagcgtaatcagccaaatcgcgttaagcggagagatttgcacatcgtagcttaccaggctcagcgcaccgctcacgccaaccgcgccagtcagtacagtgaagcccgcggctgccgtatacagactaccaaccgcgccgccaattccagctatccagccacttaacgctttttgaaaagaaaagagaaatgccagaacagcggcggcgacaaaccacgccacgccgctattgatcagggaaattgcgctcatttagcctctccactttgagcctgctgaaacaaggtgagatcgccaaagtccgtgttaaaggtcagctcacgcttacgtttgctgacgcgggcgatatcggtgttatccaccagatgcagggctttagtcgggcacatccgcacgcaggccggaccttgttcatcaaagctacaaaggtcacatttgacggcgatcgcgcgaatacctggcacccagtcaagcaatgtgctgacacgcgccggagcaggcggtgccggtggcgctttcggggtattggcgtttgccggaatatccagcggacggctgccggaaaattcaattgcgccaaacgggcaggcgatgccgcacagcttgcagcttacgcacaggctttcattcaactgcacggccccatcgacgcgggtgatggcgttaaccgggcagaccaccgcgcagggtgcatcttcacagtggtgacagagctgcggcgcagattctttttcattcagcatcactctcaggcgcggcatactttgcaggccgtgctggcgatgcgtctcactacaggcggcctcacaagtgtggcagccgatacagagcgtggagtcagcaattacaaaacgattcaccaggcattcctcaggtgattgtcatttttgacgaaaacatgccgatgaaatgtcattttcgacactcatcgacacgcccatccccaaacaggcgtaacgcctgcaaaacgggcaaagcctcagctcatgctgccgggctttgtccctttaccagttggcttaaattcaccggcacattgttttcaatagcggtgtataagctgtcgtaaacgccagcgattttttcgagatagtgttccagaacctgttcgcgatcgcggatgttgaccttgccatcaatcatgccgtcaatgctcagttgcgcctgcgcaatccgctgtttgtcttcgccatcttttgtttcgacgtaatactcgatggtgtggctgttaaagccatccgccagggtgacgtaaatgcgaaaatgttcaaaaaggacgaaacagagttctttgtccggcgcgcagctcatggcgtgatgcaggcgcgctttgcttaacgtgatcccctgaaccaggctattgcagtagatgtgccactggtcctgtaggcgacgatgccgctgtgcgatgtaatcggctttctcgcttatttcccaaatagtcattgtcaggttacccgtttaacagagatgccagctttaagcattttttgtgccaacttttaatttattgttattaaagagatttttaagctaaagatgaatttcgtcgccgtgtcgacgtgtcatttcgacatcatcgacattattcaccgcagggataatcaacactggcacaattattgcttgtagctggcaatagttaatgggaggcgatatgcacgaaataaccctctgccaacgggcactggaattgatcgaacagcaggccgcaaaacacggcgcaaaacgcgtaactggggtctggctcaaaattggcgcattttcttgtgtcgaaaccagctctcttgccttttgttttgatctggtttgccgcggcagcgtggcggaaggttgtaaactgcacctcgaagaacaagaggccgaatgctggtgtgaaacatgccaacagtatgtgacgctactgacccagcgcgtccgccgctgtccacagtgtcatggtgacatgctgcagattgtggcagacgacggtttacagattcggcggatagaaatagaccaggagtgagcgatgtgtacaacatgcggttgcggtgaaggcaacctgtatatcgagggtgatgaacataaccctcattccgcgtttcgtagcgcgccatttgccccggcggcacgcccgaagatgaaaatcaccggcattaaagcgcctgaatttacccccagccagactgaagaaggcgacctgcattacggtcatggcgaagcgggcactcacgcaccgggcatgagccagcgtcggatgctggaagtcgaaattgacgtgctggacaaaaataaccgtctggctgaacgcaaccgcgcgcgctttgctgcccgcaagcaactggtgctcaacctggtttccagccctggttccggtaaaaccaccctgctgacggaaaccctaatgcgcctgaaagacagcgttccgtgcgcagttattgaaggcgaccagcaaaccgtgaacgatgccgcacgcattcgcgctaccggcacaccagcgattcaggtgaacaccggtaaaggctgccatcttgacgcacagatgattgccgacgccgcaccgcgtctgccactggacgataacggtattctgtttatcgaaaacgttggcaacctcgtatgcccggccagcttcgatctcggtgaaaaacacaaagtggcggtgctttccgttaccgaaggtgaagacaaaccactgaaatatccgcatatgtttgccgccgccagcctgatgctgctcaacaaagttgacctgttgccgtatctcaactttgacgttgaaaagtgcatcgcctgcgcccgcgaagtcaatccagaaattgaaatcatccttatttccgccaccagcggcgaagggatggaccagtggctgaactggctggagacacagcgatgtgcataaggtaaaactggctggagacacagcgatgtgcataggcgttcccggccagatccgcaccattgacggcaaccaggcgaaagtcgacgtctgcggcattcagcgcgatgtcgatttaacgttagtcggcagctgcgatgaaaacggtcagccgcgcgtgggccagtgggtactggtacacgttggctttgccatgagcgtaattaatgaagccgaagcacgcgacactctcgacgccttacaaaacatgtttgacgttgagccggatgtcggcgcgctgttgtatggcgaggaaaaataatgcgttttgttgatgaatatcgcgcgccggaacaggtgatgcagttaattgagcatctgcgcgaacgtgctagtcatctctcttacaccgccgaacgccctctgcggattatggaagtgtgtggcggtcatacccacgctatctttaaattcggcctcgaccagttactgccggaaaacgttgagtttatccacggtccggggtgcccggtgtgcgtactgccgatgggtagaatcgacacctgcgtggagattgccagccatccggaagtcatcttctgtacctttggcgacgccatgcgcgtgccggggaaacagggaagcctgttgcaggcaaaagcacgcggtgccgatgtgcgcatcgtttacagcccgatggatgcgttgaaactggcgcaggagaatccaacccgcaaagtggtgttcttcggcttaggttttgaaaccactatgccgaccaccgctatcactctgcaacaggcgaaagcgcgtgatgtgcagaatttttacttcttctgccagcacattacgcttatcccgacgttgcgcagtttgctggaacagccggataacggtatcgatgcgttcctcgcgccgggtcacgtcagtatggttatcggcaccgacgcctataattttatcgccagcgattttcatcgtccgctggtggttgctggattcgaaccccttgatctactacaaggcgtggtcatgctggtgcagcagaaaatagcggcccacagcaaggtagagaatcagtatcgtcgagtggtaccggatgccggtaacctgctggcgcaacaggcgattgccgatgtgttctgtgtcaacggcgacagcgaatggcgcggcttaggcgtgattgaatcttctggcgtgcacctgacgccggattatcaacgattcgatgccgaagcacatttccgcccggcaccgcagcaggtctgcgatgacccgcgcgcgcgttgtggtgaggtattaacgggcaaatgtaagccgcatcaatgcccgctgtttggtaacacctgtaatcctcaaaccgcgtttggtgcgctgatggtttcctccgaaggagcgtgcgccgcgtggtatcagtatcgtcagcaggagagtgaagcgtgaataatatccaactcgcccacggtagcggcggccaggcgatgcagcaattaatcaacagcctgtttatggaagcctttgccaacccgtggctggcagagcaggaagatcaggcacgtcttgatctggcgcagctggtagcggaaggcgaccgtctggcgttctccaccgacagttacgttattgacccgctgttcttccctggcggtaatatcggcaagctggcgatttgcggcacagccaatgacgttgcggtcagtggcgctattccgcgctatctctcctgtggctttatcctcgaagaaggattgccgatggagacactgaaagccgtagtgaccagcatggcagaaaccgcccgcgcggcaggcattgccatcgttactggcgatactaaagtggtgcagcgcggcgcggtagataaactgtttatcaacaccgctggcatgggcgcaattccggcgaatattcactggggcgcacagacgctaaccgcaggcgatgtattgctggtgagcggtacactcggcgaccacggggcgactatccttaacctgcgtgagcagctggggctggatggcgaactggtcagcgactgcgcggtgctgacgccgcttattcagacgctgcgtgacattcccggcgtgaaagcgctgcgtgatgccacccgtggtggtgtaaacgcggtggttcatgagttcgcggcagcctgcggttgtggtattgaacttagtgaagcggcactgcctgttaaacctgccgtgcgtggcgtttgcgaattgctgggactggacgccctgaactttgccaacgaaggcaaactagtaatagctgttgaacgcaacgcggcagagcaagtgctggcagcgttacattcccatccactggggaaagacgcggcgctgattggtgaagtggtggaacgtaaaggtgttcgtcttgccggtctgtatggcgtgaaacgaaccctcgatttaccacacgccgaaccgcttccgcgtatatgctaataaaattctaaatctcctatagttagtcaatgaccttttgcaccgctttgcggtgctttcctggaagaacaaaatgagttatacaccgatgagtgatctcggacaacaagggttgttcgacatcactcggacactattgcagcagcccgatctggccagcctgtgtgaggctcttagccaactggtaaagcgttctgcgctcgccgacaacgcggctattgtgttgtggcaagcgcagactcaacgtgcgtcttattacgcgagccgtgaaaaagacacccccattaaatatgaagacgaaactgttctggcacacggtccggtacgcagcattttgagccgccctgatacgctgcattgcagttacgaagaattttgtgaaacctggccgcagctggacgcaggtgggctatacccaaaatttggtcactattgcctgatgccactggcggcggaagggcatatttttggtggctgtgaatttattcgttatgacgatcgcccctggagcgaaaaagagttcaatcgtctgcaaacatttacgcagatcgtttctgtcgtcaccgaacaaatccagagccgcgtcgttaacaatgtcgactatgagttgttatgccgggaacgcgataacttccgcatcctggtcgccatcaccaacgcggtgctttcccgcctggatatggacgaactggtcagcgaagtcgccaaagaaatccattactatttcgacattgacgatatcagtatcgtcttacgcagccaccgtaaaaacaaactcaacatctactccactcactatcttgataaacagcatcccgcccacgaacagagcgaagtcgatgaagccggaaccctcaccgaacgcgtgttcaaaagtaaagagatgctgctgatcaatctccacgagcgggacgatttagccccctatgaacgcatgttgttcgacacctggggcaaccagattcaaaccttgtgcctgttaccgctgatgtctggcgacaccatgctgggcgtgctgaaactggcgcaatgcgaagagaaagtgtttaccactaccaatctgaatttactgcgccagattgccgaacgtgtggcaatcgctgtcgataacgccctcgcctatcaggaaatccatcgtctgaaagaacggctggttgatgaaaacctcgccctgaccgagcagctcaacaatgttgatagtgaatttggcgagattattggccgcagcgaagccatgtacagcgtgcttaaacaagttgaaatggtggcgcaaagtgacagtaccgtgctgatcctcggtgaaactggcacgggtaaagagctgattgcccgtgcgatccataatctcagtgggcgtaataatcgccgcatggtcaaaatgaactgcgcggcgatgcctgccggattgctggaaagcgatctgtttggtcatgagcgtggggcttttaccggtgccagcgcccagcgtatcggtcgttttgaactggcggataaaagctccctgttcctcgacgaagtgggcgatatgccactggagttacagccgaagttgctgcgtgtattgcaggaacaggagtttgaacgtctcggcagcaacaaaatcattcagacggacgtgcgtctaatcgccgcgactaaccgcgatctgaaaaaaatggtcgccgaccgtgagttccgtagcgatctctattaccgcctgaacgtattcccgattcacctgccgccactacgcgagcgtccggaagatattccgctgctggcgaaagcctttaccttcaaaattgcccgtcgtctggggcgcaatatcgacagcattcctgccgagacgctgcgcaccttgagcaacatggagtggccgggtaacgtacgcgaactggaaaacgtcattgagcgcgcggtattgctaacacgcggtaacgtgctgcagctgagtttgccagatattgttttaccggaacctgaaacgccgcctgccgcaacggttgtcgccctggagggcgaagatgaatatcagttgattgtgcgcgtgctgaaagaaaccaacggcgtggttgccgggcctaaaggcgctgcgcaacgtctggggctgaaacgcacgaccctgctgagtcggatgaagcggctgggaattgataaaagcgcattgatttaactgcaaattgccggacagatctgcctgtccggcatattattcatgaggttttttcggacgatatttttccggcagttctggcaccggacgcttgtcatcgatgagatgacgcacggttaagatcggatgacgccacagcattctcggcccggcccaacgcataatctgtttcatctcttcacgctttgcaggctggtaacagtgcaccggacactgcttacaggctggtttctcttcgccgaacacacatttatccagccgcttttgcgcgtaaacaaacaacgcctcgtaatgctccggctccgcactcgcctgcgggcatttcgcttgataaagatcgatcatttttttaatcgtcagtttttcacgagagatacgcttgccggacatgctgcctccacctcattaagatgtatttatattacatcttaatcttaaagggcactatgactccaaagaagaagggttagccaaccgatacaattttgcgtacttgcttcataagcatcacgcaaaagctgcaaaacagcatctttcccggaaccagcatcaagaactcgccgttcgcttcttcccctgaaatgattaactccggtatcatgtgcgccttatgtgattacaacgaaaataaaaaccatcacaccccatttaatatcagggaaccggacataaccccatgagtgcaatagaaaatttcgacgcccatacgcccatgatgcagcagtatctcaggctgaaagcccagcatcccgagatcctgctgttttaccggatgggtgatttttatgaactgttttatgacgacgcaaaacgcgcgagccaactgctggatattagtctgaccaaacgcggtgctagcgcgggagagccgatcccgatggcggggattccctaccatgcggtggaaaactatctcgccaaactggtgaatcagggagagtccgttgccatctgcgaacaaattggcgatccggcgaccagcaaaggtccggttgagcgcaaagttgtgcgtatcgttacgccaggcaccatcagcgatgaagccctgttgcaggagcgtcaggacaacctgctggcggctatctggcaggacagcaaaggtttcggctacgcgacgctggatatcagttccgggcgttttcgcctgagcgaaccggctgaccgcgaaacgatggcggcagaactgcaacgcactaatcctgcggaactgctgtatgcagaagattttgctgaaatgagcttaattgaaggccgtcgcggcctgcgccgtcgcccgctgtgggagtttgaaatcgacaccgcgcgccagcagttgaatctgcaatttgggacccgcgatctggtcggttttggcgtcgagaacgcgccgcgcggactttgtgctgccggttgtctgttgcagtatgcgaaagatacccaacgtacgactctgccgcatattcgttccatcaccatggaacgtgagcaggacagcatcattatggatgccgcgacgcgtcgtaatctggaaatcacccagaacctggcgggtggtgcggaaaatacgctggcttctgtgctcgactgcaccgtcacgccgatgggcagccgtatgctgaaacgctggctgcatatgccagtgcgcgatacccgcgtgttgcttgagcgccagcaaactattggcgcattgcaggatttcaccgccgggctacagccggtactgcgtcaggtcggcgacctggaacgtattctggcacgtctggctttacgaactgctcgcccacgcgatctggcccgtatgcgccacgctttccagcaactgccggagctgcgtgcgcagttagaaactgtcgatagtgcaccggtacaggcgctacgtgagaagatgggcgagtttgccgagctgcgcgatctgctggagcgagcaatcatcgacacaccgccggtgctggtacgcgacggtggtgttatcgcaagcggctataacgaagagctggatgagtggcgcgcgctggctgacggcgcgaccgattatctggagcgtctggaagtccgcgagcgtgaacgtaccggcctggacacgctgaaagttggctttaatgcggtgcacggctactacattcaaatcagccgtgggcaaagccatctggcacccatcaactacatgcgtcgccagacgctgaaaaacgccgagcgctacatcattccagagctaaaagagtacgaagataaagttctcaccagtaaaggcaaagcactggcactggaaaaacagctttatgaagagctgttcgacctgctgttgccgcatctggaagcgttgcaacagagcgcgagcgcgctggcggaactcgacgtgctggttaacctggcggaacgggcctataccctgaactacacctgcccgaccttcattgataaaccgggcattcgcattaccgaaggtcgccatccggtagttgaacaagtactgaatgagccatttatcgccaacccgctgaatctgagcccgcagcgccgcatgttgatcatcaccggtccgaacatgggcggtaaaagtacctatatgcgccagaccgcactgattgcgctgatggcctacatcggcagctatgtaccggcacaaaaagtcgagattggacctatcgatcgcatctttacccgcgtaggcgcggcagatgacctggcgtccgggcgcagtacctttatggtggagatgactgaaaccgccaatattttacataacgccaccgaatacagtctggtgttaatggatgagatcgggcgtggaacgtccacctacgatggtctgagcctggcgtgggcgtgcgaggaaaatctggcgaataagattaaggcattgacgttatttgctacccactatttcgagctgacccagttaccggagaaaatggaaggcgtcgctaacgtgcatctcgatgcactggagcacggcgacaccattgcctttatgcacagcgtgcaggatggcgcggcgagcaaaagctacggcctggcggttgcagctctggcaggcgtgccaaaagaggttattaagcgcgcacggcaaaagctgcgtgagctggaaagcattagcccgaacgccgccgctacgcaagtggatggtacgcaaatgtctttgctgagtgtaccagaagaaactagccctgcggtcgaagctctggaaaatcttgatccggatagtctcaccccgcgtcaggcgctggagtggatttatcgcttgaagagcctggtgtaataacaattcccgatagtcttttgctatcgggaatattaacgacaactgacgaataaaataaaaacaccctgtataataggaaagcttattttacagggtaaaaccatgccatctacacgctatcaaaaaatcaatgcccatcactatcgccatatatgggtcgttggtgatattcatggtgaatatcagttattacaatcccgcttacatcaactctcttttttccccaaaatcgacttacttatttctgtcggcgataatattgatcgtggaccggagagtcttgacgtcctgcgcctgctaaaccaaccctggtttacgagcgttaaaggcaaccacgaagcgatggcgcttgaggcattcgaaactggcgatggcaatatgtggcttgccagcggtggtgactggtttttcgatttaaatgatagtgagcaacaagaggcaatagatctgttgctgaaattccatcaccttccacatattattgaaatcactaacgacaacataaaatatgccatcgcacatgcagattatccggggagtgaatatctctttggtaaagaaatagcggagagcgaattactctggcctgttgatcgtgtgcagaaaagccttaatggcgagttacaacaaataaacggcgctgattattttatatttggacatatgatgtttgataacattcagacgttcgctaaccagatttatattgataccggaagcccgaacagcgggcggctgagtttttataaaataaagtaatctcatgcttcttctgtgaagcatgagtaacccggtgttattgcaggccattattcatttttcgctaccagcaaagagagatcctgcttcaccagcgcgcgactggcactctccggcaaaccgtcgtctgtaataatctgatcaaactcgcttaatggtaacgccagccatgtcgccacctgaccatatttcgtcgcatcacagaccaaaactcgctggcggctggcactggcaatcgcccgtttcaccgtgactttatcttccgctggcgtagaaatcccccgcacactccaactgcttgcagaaataaaagcctgatcaatcatcaggctgcgcagcatggtcgcagcggcttccccgacacaggaacggttttcccgacacactgcaccgccagtgtgaataattgtgcaattactgttgtcgagcaagtagtccgcaataacgaaatcgtttgtgaccacagtcagactctccatgtgaatcagatgctgtgctatcgctaacgtggtcgttcccgcatccagatagatacaacttcccggctgaacaagacttgccgccagcttgccaatagccgctttttgcgtcattgccagcgcagtttttacctgatgagaaggttcatgcgccacgcgtcccggagactggacgcctccggacaccagcacaacggctccctgctgctccagtttttgtaaatcccgacgaatggtcatatgactcacattcattctgtccgttagttcagcaatactgacaatgcctttttcagctaccatctcaaggatgatttggcgacgctctacgggtatcaacttttgctccttcctttgtcctgcactcattctacgctatttgcctgcgaaacgtgcgcggcgcaactaacgcttagttcacataaaataacacacaatgttaatttatgtgaatcagatcaccataccgttatcttccagcgcttatattcacaatatcaaacaaaatatcacttaaattaacaaggagagcagatgaaaacgggatctgagtttcatgtcggtatcgttggcttagggagtatgggaatgggagcagcactgagttatgtccgcgcaggtctttctacctggggcgcagacctgaacagcaatgcctgcgctacgttgaaagaggcaggtgcttgcggggtttctgataacgccgcgacgtttgccgaaaaactggacgcactgctggtgctggtggtcaatgcggcccaggttaaacaggtgctgtttggtgaaacaggcgttgcacaacatctgaaacccggtacggcagtaatggtttcttccactatcgctagtgctgatgcgcaagaaattgctaccgctctggctggattcgatctggaaatgctggatgcgccagtttctggtggtgcagtaaaagccgctaacggtgaaatgactgtcatggcctccggtagcgatattgcctttgaacgactggcacccgtgctggaagccgttgccggaaaagtttatcgcataggtgcagaaccgggactaggtagcaccgtaaaaattattcaccagttgttagcgggcgtacatattgctgccggagccgaagcgatggcacttgcagcccgtgcggggatcccgctggatgtgatgtatgacgtcgtgaccaatgccgccggaaattcctggatgttcgaaaaccggatgcgtcatgtggtggatggcgattacaccccgcatagtgccgtcgatatttttgttaaggatcttggtctggttgccgatacagccaaagccctgcacttcccgctgccattggccagtacagcattgaatatgttcaccagcgccagtaacgcgggttacgggaaagaagacgatagcgcagttatcaagattttctctggcatcactctaccgggagcgaaaagttgagctaaactctaccgggagcgaaatcatgatcaagattggcgttatcgccgatgattttaccggcgcgacggatatcgccagttttctggtggaaaacggtctaccaacggtacaaattaacggtgttccaacaggtaaaatgccggaagcaatcgacgcactggtgatcagcctgaaaacgcgctcctgtccagtggttgaagccacacagcaaagcctggcggctctgagctggttgcaacagcaaggttgcaaacagatctatttcaaatactgctctactttcgacagtacggcgaaaggtaatattggcccggttaccgatgccttaatggatgctctcgacacgccgtttacggtcttctctccggccctgccggtcaacggacgtacggtttatcaggggtatttgttcgtaatgaatcaactgctggccgaatccgggatgcgccatcacccggtaaatcccatgaccgacagctatcttccccgtctggttgaagcgcaatccacagggcgctgcggcgtcgttagcgcacatgttttcgaacaaggtgtggatgccgttcgtcaagagctggctcgcttacagcaagagggctaccgctacgcggtgcttgatgcgctgaccgaacaccatctggaaattcagggagaagccttgcgcgatgccccactggtaacgggcggttctggtctggcgattggcctggcccggcagtgggcgcaagaaaacggtaaccaggctcgcaaagcagggcgtccgctcgctgggcgcggcgtagtgctctccggtagttgctctcaaatgaccaaccgccaggtagcacattaccgtcaaattgcaccagcccgtgaagttgatgtggcacgctgcctcagtattgaaactctggccgcttatgcacacgaactggcagagtgggttctgggccaggaaagtgtacttgctccactggtttttgccaccgccagcactgacgcattggcagcaattcaacagcaatacggtgcacaaaaagccagtcaggcagtagaaacactgttttctcaactagcggcgcggttagcagcggaaggcgtgacacgctttattgtcgcaggcggtgagacctccggcgtagtcacacagagcctgggaataaaagggtttcatattggcccaaccatttccccggcgtgccgtgggtaaacgcactggataagcctgtctcactcgcccttaaatctggcaacttcggtgatgacgcctttttttcacgagcccaaagagagtttttatcatgagcgatttcgcaaaagtagagcagtctttgcgagaggagatgacgcggattgccagtagtttctttcagcgcggctatgcaaccggtagcgctggcaatctgagcctgcttttacctgacgggaatttactggcgacaccgacaggtagttgcctgggcaatctcgatccgcagcggctttccaaagtcgccgcggatggcgaatggttaagtggtgacaaacccagcaaagaggtgctctttcatctggcgctgtatcgcaacaatccgcgctgtaaagcggtggtgcatttgcacagcacatggagcacggcgctttcctgcctgcaagggctggacagcagcaacgttattcgtccgttcacaccatacgtggtgatgcggatgggaaatgtcccgctggtgccttattaccgaccgggcgataaacgcatcgcacaggatctggcggaactggcagcagacaatcaggcttttttactggcaaatcatggcccagtggtttgcggtgaaagcctgcaagaagccgccaacaatatggaagagctggaggaaacggcaaagctgatttttattctcggtgaccgcccgatccgttatctgaccgcaggtgaaattgcggaattaaggagttaatgcaatgcctcgttttgcagctaatttatccatgatgttcaccgaagtgccttttattgaacgcttcgccgcagcgcgaaaagccgggttcgatgctgtggaatttctgtttccctataactactccaccctgcaaatccaaaagcaactggagcaaaaccatctgacactggcgctgttcaataccgctcccggagatattaatgcgggggaatggggattatccgcccttcccggacgtgagcacgaagcacacgcagacatcgacctggcactggaatatgcattggcgctcaattgtgaacaagtccatgtgatggcaggcgtcgtgcccgctggcgaagatgctgaacggtaccgggcagtatttatcgataatatccgctacgctgccgaccgctttgcgccacacggcaagcgaatattagttgaagcactcagccccggcgttaagcctcattatctcttctccagccagtatcaggcactggctattgttgaagaggttgcgcgagataacgtgtttattcaactagatacttttcatgcgcaaaaagtagatggcaacctgacgcatttaatccgcgactacgccgggaaatatgcgcacgtacaaattgccggactacctgatcgacatgaaccggacgatggagaaatcaactatccgtggctgttccgcctgttcgatgaggtgggatatcagggctggatcggttgtgaatataaacctcgtggcctcaccgaagaagggcttggctggtttgacgcctggcgctaattcgttaaatccctaattacaacgtacccatacatccccccatctacggatggggtaggttaactataactttcagacagggtttcccatgtccacaattacattgttatgcattgcgttagctggcgtaatcatgctgttgctgctggtcatcaaggcaaaggtacaaccattcgttgctttgctcctcgtcagcctgttagtcgcacttgcggcaggtataccggcgggcgaagtgggtaaagtgatgatcgccgggatgggcggtgtgcttggttccgtcactattattattggtctgggcgctatgctggggcgtatgatcgaacactctggtggtgcagagagtctggctaattatttcagtcgcaagttaggtgacaaacgaactatcgctgcgctgactctggcagcgttcttcctcggtattcccgtcttctttgatgtcggctttattattcttgcgccaatcatttacggttttgccaaggttgccaaaataagcccactcaaatttggcctgcctgtcgctgggatcatgctcactgttcacgtggcggtaccgccgcatccaggccctgtcgccgcagcggggttactccacgcagacatcggctggctaaccatcatcggtattgcgatttctattcccgtaggggttgttggctactttgcagcgaaaataatcaataagcgccaatatgcgatgagtgtagaagtactggaacagatgcaactggctccggccagtgaggaaggcgcgacaaaattaagcgataaaataaatccaccgggcgtcgcgctggtcaccagcctaattgttattcctatcgcgattatcatggcgggtacggtttccgcaacactgatgccgcctagccatcccctgcttggtacgctacagctgatcggcagtccaatggtagctctaatgattgcgctggtgctggcattctggttattggctttacgtcgcggctggagcttacaacacaccagcgacattatgggcagtgcgcttcctactgcggcggtagtgattttggttactggtgctggaggggtatttggcaaagtgctggtggaaagcggcgtcggcaaagcccttgccaacatgctacaaatgattgacctgcctctgttaccagccgcatttattattagtctggcgctgcgtgcaagccaggggagtgcaaccgtagcaatactgacaaccggcgggttactcagtgaagcggtgatgggattgaatccgattcagtgcgtattggtgacgctggcagcctgctttggtgggcttggtgcgagtcatattaatgacagtgggttctggattgtgaccaaatatctggggttgagcgtagcagacggtctgaaaacctggacagtgttaacgaccattctcggttttaccggattcttaattacctggtgcgtatgggcggtaatttgaccttaataaaaaggtccgatgggcatcggaccttttattgtgcacagaaaaggccagcctcgcttgagactggcctttctgacagatgcttacttactcgcggaacagcgcttcgatattcagcccctgcgtttgcaggatttcgcgcaaacggcgcaggccttcaacctgaatctggcgaacacgttcacgggtgaggccaatttcacgacctacatcttccagtgttgccgcttcgtaccccagcaaaccgaatcgacgtgccagcacttcacgctgtttggcgttcagctcgaacagccatttgacgatgctctgcttcatatcgtcatcttgcgtggtatcttccggaccgttctctttttcatcggccaggatgtccagcaacgctttttcggaatcaccacccagcggggtgtctacgctggtaatgcgctcgttaagacgaagcatacggctgacgtcatcaactggcttatccagttgctctgcgatctcttccgcacttggttcatggtccagcttatgggacaactcacgtgcggttcgcaggtaaacgttcagctcctttacgatgtgaatcggcaaacgaatagtacgggtttggttcataatcgcccgttcaatcgtctggcgaatccaccaggttgcgtatgtactgaagcggaaaccacgttccgggtcaaacttctctaccgcgcggatcagccccaggttgccctcttcgataaggtccagcaacgccagaccacgattgccataacggcgggcaatttttaccaccagacgcaagttactctcgatcatccggcggcgagaggcgacatctccacgcagtgcgcgacgcgcaaaataaacttcttcttcggccgttaacagtggactataaccaatctcaccaaggtaaagctgagtcgcgtccaacacacgctgtgtggctccctggcttaacagttcctcttcggccaaatcgttatcactgggttcctgttctactaaggccttttcgtcaaaaacctcaactccgttctcatcaaattccgcatcttcatttaaatcatgaactttcagcgtattctgactcataaggtggctcctacccgtgatcccttgacggaacattcaagcaaaagcctggttccgccgatttatcgctgcggcaaataacgcagcgggtttacggatttccccttgtaacgaatttcaaaatgcaagcgtgtactactggttccggtgctacccatggtcgctattttttgccccgccttaacttcttgttgttcccggaccagcattgtgtcgttatgggcgtaggcactcaggtaatcatcattatgtttgatgataatcagattaccgtagccgcgcagcgcgttaccagcataaacaacgcggccatctgcggtcgcgataattgcctgtcctttgctgcctgcgatatcaatccccttgttgcccccctcagaagcgccaaaggtttcgatcactttgccctcagtcggccagcgccaggtggagataggcgtactggtacttgtactgctgacagtcggctcggttgtgcttgctgttggtaccgttacaggcgctgtgaccgtggtcgcagttggcttgttgttcggcaacattttgttagcactctgttcaccgctagactcagaatacgtaattgtcggttggctcgcaacagcaacggtggaattttgtgcaggcttgatcacaactccttgctctgctgcgtcggcctgggtaatggcatttccgccagtgattggcgtaccggaagcattacccacctgcaaggtctgaccaacgttcagcgcgtatggtgcctgaatattgttgcgctgagcaaggtcacggaaatcgttgccagtaatccaggcgatatagaaaagtgtgtcgccttttttcacggtataggtactgccgctataactgcctttcggaatgttcccatactgacggttatagacgatgcgtccgttttccatctgtaccggctgctgagctactggctgcactggctggatttgcggttgttgagtagcctgaatttgtggctgctgcaccggctgaatttgcggttgctgcgctgtagacgtcgtccccattttcggcggcggcgtaatcaacataccagaattagtatttgcaggcgcattgccattaacggagctgaccggtgccggtggattactagtgtcagaacagcctgccagccataggctaaccagactcaaagccgcaatgcggcgaacggtgaattttgggcttcccgcgctcatttatcccccaggaaaaattggttaataaccagtgacataattaccgtgcaaggcaccctactgaacactggaaaagatgttcacgatacgctgacctgcggcaaaataaccaggaaaaatccaggtatttcctcacgttttaagccagctcacccttcactaaagggacaaagcgcacggcctccacggtatcgataataaattcgcctccccgacgacgcacccgtttcaaatactggtgctcctcccctacgggtaagacgagaatcccgccttcgtccagctgcgtcattagcgcagttggaatttccggcggtgccgccgtaacaatgatagcgtcaaacggcgcacgtgcctgccaaccttgccatccatcgccatgacgggtactaacattatgtaaatcaagatttttcaggcggcgacgtgcctgccactgcaagcctttaatccgttcaacgctgcaaacatgctggacaagatgcgccaggattgccgtttgatatccgctaccggtgccaatttccagcacccggctctgcggcgtcagctcgagtaattcggtcattcgcgccaccatatatggctggctaattgtctgcccctgacctatcggcaaagcgatattgtcccaggctttttgttcaaacgcttcatcaacgaatttttcacgcggcacggcggcaagtgcattcagcacctgctcatcctgaataccttgcgcacgtaattgatccagaagtgcttgtacgcgtctgcttaccattgcgtgccaactcccacgctgtttaaccagtcactaaccacatcttgcgcgctatgcgcagttaaatccacatgcagcggcgtgatggagacatagccctcatctaccgcagcaaaatcggtccccggaccagcatcacatttaccgcccggcgggccaatccagtacagcgtattgccgcgcggatcttgctgcgggatcacctgatctgccggatgtcgtgtaccgcagcgcgtcacgcgaatacctttgatttgatccaagggtaaatccggaacgttaatattaagaatacgcccggtgcgcagcggctctttacacagtgcgcgcaaaatactacaggttaccgccgcggcagtgtcgtaatgtttatgcccgtcaaggctgacggcaagcgccggaaaacctaaatgacggccttccatcgcggcggctaccgtaccggaataaataacatcatcccccagattcggcccggcgttaattccggacacaacaatgtccgggcgcggacgcatcagagcattcacgccaagatagacgcaatcggtcggggttcccatttgcacagcaatatcaccattttcaaaggtaaacgtgcgcagggaggattccagtgtcagagaattactagcgccgctgcggttacgatcgggggcgaccacctgaacgtcagcaaactcacgcaaggctttcgccagcgtttgtataccgggtgcatgtaccccgtcatcattactcagcaatatgcgcataatcacctgttgtgttgataagttccctgacaacgctggttgcaaaactacccgccggaagccagaaacggatctctacggtgacgtcatcccaccaattccagcttaattgttgcggatacagcagcatcgctctgcgcgcggcttcaactttttcgcgcaccagtaaagcttgtaattcagtttctgcggcgacagctgcttgttcgaatgccagcgcttcacgctgagttccccattcgccactgcctggcaatgcggcggttatcatcaactctttatcgttgacgcgacgctgtaattccgccagttcttcggtggttgcgacaaaccagctaccacgtccggctaattgtagcgcatcgccgtcaacaacttgattaacgtctgcttttttgaggcgctcagcaacaatctgattaaacaacgcactgcgggctgcgctcaaccaaaaactccgtttattgcgatcgcgcaccggagtattggtttgcgcccagcgctgcgccccctgcaagttgctaccgccaatcccaaaacgttgggcaccgaagtagttcggtacaccttttacgcaaatatcgatcagacgttgttcaacgtcatcgcgattgctcacttcgcgcagaaccagggtaaaggcgttacctttcagcgcgcctaaacgcagcttgcgcttgtgccgcgcatactccagcacctggcagccttccagttgaaaggcgctcagatcgggcatttccttgcccggcacgcgagcgcataaccactgttccgtaacagcatgtttgtctttttgcccagcgaagctgacttcacgggcatgaattttcaggaatttcgccagtgcatccgccacaaaacgggtattgcagccgtttttgaggattctaaccagaatatgctcaccttcaccatcaggctcaaagcccaaatcttccaccaccacaaagtcttccggattggctttcagcagcccggtgccttgcggtttaccgtggaggtaagtgagattatcaaactcaatcattttgttgccttaatgagtagcgccaccgcttcacaggcaatcccttccccacgtccggtaaatcccagtttttccgtagtagtggctttcacgttaacatcatccatatggcagccgagatcttcggcaataaacacgcgcatttgtggaatgtgcggcaacatcttcggtgcctgagcgatgatagtgacatcgacgttgccaagggtataacccttcgcctgaatacgacgccaggcttcgcgtagcagctcgcggctatcggcacctttaaatgccggatcggtatccgggaacagcttgccgatatcccccagcgccgccgcgccaagcaatgcatcggtcaacgcatggagcgccacgtcgccatcagaatgcgccagcaatcctttttcgtaaggaatgcgtacgccaccaatgataattgggccttcaccgccaaaggcatgtacgtcaaaaccgtgtccaattcgcattatgtattctcctgatggatggttcgggtgaggtaaaactcggccagtgccaaatcttccgggcgcgtgactttaatgttatccgcacggccttcgaccaactgaggatggaatccgcaatattccagcgcgctggcttcgtcggtaatagtcgcgccttcatttagagcgcgcgtcagacagtcatgtaacagctcacgagggaaaaattgcggcgtcagcgcgtgccataagccgttgcgatcaacggtatgagcaatggcatttttgcccggttcggcacgtttcatagtatcgcgcactggtgcggcgaggatcccccccgtgcggctggtttcgctcaacgccaacaatcgcgcgaggtcatcctgatgcaaacaaggacgagcggcgtcatgcaccaatacccactgcgcgtcgccagcggctttcagacctgccagcacggaatcggcacgctcatcaccgccatctacaacggtgatttgcggatgattcgccagaggaagttgtgcaaaacggctatcgccaggacttatggcaatgacgacacgtttcacccggggatgcgccagcagcgcatgcacgctgtgttcaagaatggtttgattaccgatactgagatattgcttaggacattccgtttgcattcgacggccaaatccggccgccggaaccacggcgcaaacatccaaatgagtggttgccatgttaattcccgggctgatttatcgattgttttgccccgcagactgtgcgcgcttgctcgcgtcaggcaccagacgataaaaagtttcgcccggcctggtcatgctgagttcattacgcgcacgctcttcgagcgcctcctggccgccattgagatcgtcaatttcggcaaaaagttgatcgtttcgcgctttaagtttcgcgtttgtagcttgctgtgccgccacatcatcattgacgcgggtatagtcatgtataccgttcttaccgaaccacaggctatactgtagccagaccagaatagccagcaacagcagcgttagtttacccatcctgccccctgaaaaacggcatcatcatcccatgcatccgaagacgactctacatcctctgttggggataccgcgacaacgcgggcaaatgtaccacatttgtccattgttacgtatacccagggcgtgcagaacataatctcattattagttacggtttgaattatgaacagaggagacgggaaagtacaaattagcccagtagccacataaacagtgcgccaaacataatgcctactgtcaccagggtgaaaacaatactgtagcgtagctttccgtccatcaaactatgcagcgcaatccccaccactaccgcgacgggcatcagcgccagaaagaaaggccaggtgtagataaagaagaacagcgtgttagagccataaatcaacatcggcatcgccagcgcaaataaccaggagataaaaccgaccacggcaccaggcagactccatgtggtttcttcatcctcagtaaggctgtcgttatttgttagtgtaatgttatggctattacgcatatttgatcctgttactttgacgaaccgggcatggaaacccggtggtgtctcaggatctgataatatcgttctgtctcaacagatctaataattgctgtaccaaatttgttactaattgttcaccattgagatgaatttctgcgctttcaggcgcttcgtaaacggaatctattcccgtaaagttgcgcagttcaccggcacgcgctttcttatataagcctttgggatcgcgggcttcgcaaatcgccagcggcgtatcgacaaacacttcgataaagcgcccttctcctacgcgttcgcgaaccatctggcgttcggcgcggtgtgggctgataaatgcggtcagcaccaccagtccggcttcaaccatcaaattcgccacttcaccgacgcgacggatattctctttacgatcggcatcgctaaaaccgagatcgctgcataatccgtggcgaacattgtcgccatccagcagatacgtactgacgccgagtttatgtaacgcctcctccagcgccccggcgaccgtacttttaccggacccggagaggccggtaaaccacagcactacaccacgatgaccgtggtgtagctcgcgttgttgcacagtgaccggatggctatgccagacgacgttttcgtcatgcagcgccattatttatcccccagcaaatcgcgcgcgccccagtgcggaaagtggcgacgaaccagagcattcaattccagttcgaatgcactgaattcagatggcgcagcagttgcctggctaactggctcgtgcaccataccggcacccacggtcacattgctcaggcgatcgataaaaatcagcccacccgtcaccggattttgttgataacgatctaacaccagcggctcgtcaaaagtgagatccacgaggccgatcccattcagtggcaggttttcaacttcacgctgggtaaggttattaatatcaacctgatagcgaatgccatcaacacgcgcgcgcgtcttcttaccggcaattttgatgtcgtaactctgccctggagaaagcggctgttccgccatccataccacatccacgctcgcgctctgcaccgccggtaacgcttcgtctgccgccagcagcagatcgccacggctgatgtcgatctcatccgtcagcaccagggtgatcgcttctccggcaaaggcttcttcgcgatcaccatcaaaagtcacgatccgcgcgacgttactttccacaccagagggcagcactttgacacgttgcccgacttccacgcgaccggatgccagcgttccggcgtaaccacgaaaatcgagattcgggcgattaacgtactgcaccgggaagcgcattggctgagcatccaccactcgctggatctccacggtttccagcacttcgagcagtgtcggaccgctgtaccacggcatactttcactttggcttgccacgttgtcgccttccagtgcagagagcggcacaaagcggatatccagattacccggcagctgcccggcaaaggtcaaataatcttcacgaatacgggtgaacgtctcttcactgtaatccaccagatccattttgttgatcgccacgaccagatgtttgatccccaacagtgtggagataaaactgtgacgacgggtttgatcgagcacgcctttacgggcatcgatcagtaagatcgccagttcacatgtgcttgcgccagtcgccatattgcgggtgtactgctcgtgccctggggtgtcggcgataataaatttacgcttctcggtagagaaatagcggtaggccacgtcaatggtgatgccctgttcgcgctcagcttgcaggccgtccaccagcagagccagatccagcttttcgccctgggtgccgtgacgcttactgtcgttatgcaggctactgagctgatcttcgtagatttggcgggtatcgtgcagcagacgaccaatcagagtacttttgccgtcatcgacgctaccacaggtcagaaaacgcagcaggcttttatgttgttgcgcaatcatccaggcttcgacgccgccttcattggcgatttgttgtgcaagtgcggtgttcatcttaaaaatacccctgacgttttttcagctccatagaccccgcctggtcgcggtcaatcacgcggccctgacgttcactggtggtggaaaccagcatctcttcgatgatttccggcagtgtttgtgcattactctccaccgcaccggtcagcggccagcagcccagcgtacggaaacgcaccatccgttttttaatcacttcgcccggttgcaggtcgatacggttgtcatcaatcatcatcaacataccgtcgcgttccagaaccggacgttccgcagcgagatatagcggaacaatgtcgatattttccagccagatgtattgccagatatcctgctcggtccagttagagagcgggaagacgcggatgctttcgcctttgttaatttgcccgttgtagttgtgccacagctccgggcgctgatttttcggatcccagcgatggaagcggtcacggaaagagtaaattcgctctttagcgcgggatttctcttcgtcacggcgcgcaccaccgaaggcggcatcaaaaccgtatttgttcagcgcctgtttcaggccttcagttttcataatatcggtatgtttcgcgctgccgtgcacgaatggattaatccccatcgccacgccttccgggtttttatgcaccagcagttcgcagccgtaggctttagcagtacgatcgcggaactcatacatctcgcggaatttccagccggtatcgacatgcagcaacgggaaaggcagcgtacctggataaaacgccttgcgcgccagatgcagcatgacgctggaatctttaccgatagagtagagcatcaccggattactgaattctgccgccacctcgcgaataatgtggatgctttccgcctccagttgccgcaggtgagtaagtcgtatttgatccataaccgttcctttgcaataccgctattttcttgccatcagatgtttcgactatagggagcgtaagagaacgaatgaaattaccaattagaatgagtagttccttaacggaataacgatttggcaaagctaatatcaaaaagtgcttaaggcaccggatttcgggcgtttaggaagatttgaaattgttttagcgcagcggcagtttcatactatggcggtaaaaaaatttgcatggtatttaaggactcactatgttttccgcattgcgccaccgtaccgctgccctggcgctcggcgtatgctttattctccccgtacacgccagcagtcctaaacctggcgattttgctaatactcaggcacgacatattgctactttctttccgggacgcatgaccggaactcctgcagaaatgttatctgccgattatattcgccaacagtttcagcaaatgggttatcgcagtgatattcggacatttaatagtcggtatatttataccgcccgcgataatcgtaagagctggcataacgtgacgggaagtacggtgattgccgctcatgaaggcaaagcgccgcagcagatcatcattatggcgcatctggatacttacgccccgctgagcgatgctgacgccgatgccaatctcggcgggctgacgttacaaggaatggatgataacgccgcaggtttaggtgtcatgctggaattggcagaacgcctgaaaaatacgcctaccgagtatggtattcgatttgtggcgaccagcggcgaagaggaagggaaattaggcgctgagaatttactcaagcggatgagtgacaccgaaaagaaaaatacgctgctggtgattaatctcgataacttaattgttggcgataaattgtatttcaacagcggtgtaaaaacccctgaggcagtaaggaaattaacgcgcgacagggcgctggcaattgcgcgcagtcacggaatagccgcaacgaccaatccgggtttgaataaaaattatccgaaaggcactgggtgttgtaatgacgcagaaatattcgacaaagcgggcattgctgtacttagcgtggaagcgactaactggaatcttgggaataaggatggttatcagcaacgcgcaaaaacacctgccttcccggcgggaaatagctggcatgacgtaagactggataatcaccaacatattgataaggctcttcctggaagaatagaacgtcgctgccgtgacgttatgcggataatgctacctctggtgaaggagttggcgaaggcgtcttgatgggtttgaaaatgggagctgggagttctaccgcagaggcgggggaactccaagtgatatccatcatcgcatccagtgcgcccggtttatccccgctgatgcggggaacaccagcgtcaggcgtgaaatctcaccgtcgttgccggtttatccctgctggcgcggggaactctcggttcaggcgttgcaaacctggctaccgggcggtttatccccgctaacgcggggaactcgtagtccatcattccacctatgtctgaactcccggtttatccccgctggcgcggggaactcccgggggataatgtttacggtcatgcgccccccggtttatccccgctggcgcggggaactctgcgtgagcgtatcgccgcgcgtctgcgaaagcggtttatccccgctggcgcggggaactctctaaaagtatacatttgttcttaaagcattttttcccataaaaacaacccaccaaccttaatgtaacatttccttattattaaagatcagctaattctttgttttcaaacaggtaaaaaagacaccaaccttaaaccatccaaatctaccggggtacgcctgtttaacccaaatgtctggaactcaaatcccgtttccgtattcgttgcccatgccatcactacattgccttcttccgccagtccagctatttgttcccagatcatttcacgaatttttgcggatacatcacctacatatacccctgcacgtacctccaacaaccagatggctaatctgcctcgtaagcgcggaggtacattttcagtgaccacgaccaacatactcatttcagctactccgatggcctgcatctcccagactaacaggaagcggaatggcaacaggctgtgcatcttcaggtggggccggcggttgtatttctccagcggcaagcacgtcctctataagcggaatcaatttggctaatgttttactactgcgaaaaatatccctgcacgccaaacggacttcccggtccggctcaccagggttacgacgcgctatctcaaaagctttcggtacaacagtgtcaaatttaatgatgtctgcaatatcgtaaacaaaggaaagaggctttcctgtatgcacaaacccaatagctggtgcataaccagctgcaagtatcgccgcttcagttacgccgtataaacaggaagttgcagcgctaatgcattggttgatcgtatcgcccttttcccagtctttcggatcgtagcgacgtccattccatgtcacgccgtattgcttcgccagaagtgcgtaggttgcccgcacgcgactgccttctatacctctgagttgctctacggagcgccgggcaggcgcaggttctccaaaccgaagttcaaacattttacgtacgaccttcagacgcaaatcttcatccagagcaagttttgcctgatagagcagcttatcactacgcgcacctccaggctgaccagaagcataaacacgaacgcccgcttcccccacccataccaacaatgttccaacttgcgcagccaggcgtacagctgcatggctaacccgtgtaccaggttccagcatgatgcaggcaacgctgccaacaggaatatgagtgcggatccctgtcttgtcgataagtacaaacgcgccatctattacatcgatctgcccatattgcagaaagatcatggagacgcgatctttgagtggaatgggattaaggggaagccaggtcattttattacacctcaatcacagtggagccaaagatagcaagccacatcccatgcttttagctggcccaataccttgctgtacaagatctattaacgctggcgcgtcgttgatggtgagcacaccttcaaagcaaaccgtttggatctttccacttttaccatcaccagaaaaatactgtggccgttcgcttatgggatgcacatcttcaacgcgcgccgcattgcccaatttacgttgcaaccacgcgatttgttctgcttcttttattaacggaacccgacagcgtttaatattccctttactgtccaggcgcttttgattgtcgagaatagttttgatcggatttgcccgaagccgaaaatagagtggaacaccaacctgaagttgaaattcaacctgtttagttttaatgactgtcgcaacggcagtactaacaggcatttgcgcactctgcaataaaacatgacagccttctggtgtgtttcgcttctcaacatgaaaaagaaaatcacgagcagcatccggtctgtttggaaataaatgccataatccctggtgaagttggtaaagatccctgctccaggccctggcaatgatgactttactgagatacatccatacctcctttaatcacataccattctcgggaagcaaattgtcgaggcaaggtgatcatcggttcgtcgcgcgccgtaaattttaaatgatgccctgtaacactttcctcactatatatatcgccgccaacgggctcataatttaatagcgccttctgaggatcgcttgcctgacatgtccccaaaaaaagcgggtgtgttagtgggcaacttctccgccccaggtaaggtgtataccgaggctttaatactgctttttcaagttcactgataaccatcgttgcatggggtgttaaccagagagcgacggtaaaggaggcatcacataaatattcgcgccatgtttgaatcgtttcatgacttttcaaaccacggtaatcttctcgcgctccaaggactgtatggtaatcacgcaaccccgttacagacacacgacgatcgtcaagaatgagttcatcgcagcgcactgcaaattgcacactctcacttaacgcctgtaaactagaagtatcatcacgttggatcccaagacaagccccgagtagccctaataacccgcttcgggtcggaaatcttccggtaggtcgcgttccttcaaaggtcggctgcccccaggcttgcattggcccagcaagccgcaagatcaaataagatctcatgttcacgcctcgccattattacgaacccaggattttaactgttctaaagtaggcatttgtttaacttgagcagtaattgggtctacatcagataagctgaattgcgcagcagctccgttcagaccatatccattggcaacgcgatcccaatattgattaaacgcctgtatagacggttgcaaaaagccatctttcgctttaaccgctttttcaaaagcatttgccatagaaagtggcatatcggagaaattaaccattaccatatccgcagggttaaaagcggcataagtacgctgttttgctccagggacctctgttgccagcatatgaacaacatgggttgcaatttccagagcctgctccctggaggcaccacctaaattttcctgaagttgagcgaggttaatgttggcataacgataaaaaacaccgctactaaattcctgagttcccagatgtgcagaaccttgttcctgtaaatcatctacagcggtgaaccagtcaatatcagaatcaacctgatgagtagtgatcgcatgcgcaatggacattgcaccatcaacttttcccaactcagtcatcatgccgctggttgccattcttccactaagcgcaatatcaacaccctgctgtaaattcacacgtatggcggcaatatcttccttaagaactttgagcagctttttatcatccagattatcagcctctgcttttgcaacctgctcacagaaccaggctatttctcccacaacccagggagtaaccgcatcggcagaaatcttttcggcttcatcaacacttttaccggagagcagcgctaatgtcttatcgatgattttttggtcaaaacgttcaccaagtttttgccgaagaacatcacgtaattgtgcaagatgaatggttctgagactggattcaccaatattttgtgcgtaataaccacttttacgcatcgcacgtttaaggctttgactactaattcttactcgtcttttgccgccgaaaatagcgtctttctgcatgttcatatcgtcgcggttcagacaactagggctgtgagagatcagaacatgaatattgataaagttagacatagaaaggtttccttacgcatttttgtttgtggtcaatacaaaatcttccagaagttgctggcgttcgcgctttccccaccaggtcaacatcctggccattaatggccagtcaagtacgggttcggcgtgagtaagtaatcgacgtaactggaccatatcggctgttctgtcagcccgaattaattgaaagatacggcgctcgttaattcttccactattggctaaagctcttcccaagctgatacctgttgtttgctcgctttttttgtcctgatgtcggatgacattctttcctgcgctcaggcaaaacaccatgcgcaaaagagcctgctggtgacgtgggttttcccaaccaaaaggttgcaccagcctataaaacgcagggatatcgcgtaattcatcaggttcactaacacgtctaatttgcgcacaacttccattatccagttgttgccaggctcgatataaagccattgcatcaatttcatcagccattacttggccctccttgcggttttaactcccgtaaatgtttgtatagcgtggcgcgggcaagcgctaatgtgcttattaatttaggatgatgtgcatagggagctacagattgattaaatagcatttcacacaattgatgaagtttgtctcgtaaatcagctattacctcatcagcctgggaaaaattaacattcgccagtacatcgggaattaataattcactctgtcgatagaaatgcctttctgcagtctcatgaacagagactccggcccctttgaagtctttatttttaaacccttctgcaaaggtatataacgccttgcgtaaggctgttttatatcccaaaccaacagtcactatttcgtttatcacattgccgtattgttgccacccctgattaaacatcaacacatcatgacgccgttcaagaatagatgcttgattattacgatatccccccataatcaattcaagaggactttgcggcgcaatatttctgaattgattcacaaccgccgccacgcgatttccattttcattttgaataatcttatctaccacaactcggctgatttgtgtccaacttggtgcggaggtggtgaaagcaagaaatttttcctcaacctcccctttcttgactgttaccagacaaggggaatgcggatggggccatagcccattaactgtaaaggtaaatttttccttaagaaaaccggtataacgcaaattgctttcctgtccacagcaagaacatttaccaatcccaatgggatcgcataattcaatatgcgctggttgccagaatagaccacggacaaacccaatactgctagcaggtatagactcattggacttgataggtttaatccaggtaggttggttttccgtatgactttcattaggaaattgtttttgaagacgaggtaatgtgaggacattgagtaacaccgtactacgaagatcgatcccacgtacgaacgttgttacaggtgttcctccacgtaaaccgcttttaaaaccaccaccaaaacctggtgcctgattcgcctggttgaataacgcaatcgcagtgcatccaccacataatgcttcaccctgccccggttgattgacaaatgcacaattcgtcgcgccgcttaccccagccaacagtttttccattggagtcacatcatttgctttgacacctttggtctgcataaagggatgttctgcgtgattaaggtagaacatatctatccacggcgcgatgagttgttgaaactcatcttcagtgagcggattcattatgcgatgtcgaaattcaacgtcatcttttgccggggcgataatttgcccaatgcaaaccagcagtgctaaagcggccagttccatatcgtcacggggcaaacttaatcgccactgatctctactgcagtataggctttgcagatttatgatttggactttccccccgtttcgcgggcgtacagggatccagttatcaataagcaaattcatttgttctccttcatatgctccgacatttctcctgcatttctatacgtcggcacacttccgttatcggtaaaaacaaagaaaaaatacggcgtaattaattcaataatcacattcactgcaaaaatatattcattggtttaatacaattaacctatacatatattaagatgtgttgaattgtttaaagacaataatgcatgcatttcaaatctgcaagttattcgttttattattaaagaaacttttagttataataattaccatgaattttattacataaaatattcatactgtgaatataaaatctcataccgggaaattaaaagaagatgtacattgtgcaccttccctacttaagtagggataaaccgttattggtcttattatcgtcattgataacaatcattcccgaagttatttgggatttgcagggatgactctggtcatcccttcatcccctgtataggtaataacaatactgttaccctgccagacccatccatccagattctgtttcccttccagccaaagtaacccatcttcatctactacttcagaaaaactacgtttccaggtgaagggtacattgacgcgattaagtgcaagcgcctcatactgctgttcatgacttaggtcctcgtagacctggccatcgagcagttgtttaccactagacgtttgtacataaggcaataatggcaggctcatttccccatccctcgttaccgcaagaatggtttcatcgttatcctgcaagctatattcttcagcccactgcaggaccttgcgagccttgaaccttttttcacactcggcgctttcaaatttatccatgccattgccgacccattctggctcatccatttccgcatcatcgtaaatgctatccagccattgccggtaagcatcagggaaaaataaggatgctccattaagctcctcaatatgttgctgcgtccgccacatgactctaacgttgctataaatatgctcatgtcgtccgtaaccctcgccatcaggcagcaaaatggtggcaacaggaatctcaaaaccagcgggacgatatttgcgatgatggcgatgtaaacggcccaatcgttggaaaagcaaatctgcaggacaatgctgagtaattaaccaatcaaaatcaacgtcgagactttgttccacgacctgggttgcgacaagtatccgtccaacatttcgcttcccatttttgccgaaattgctaataactcgattctctttttcacgacgatcgttcagcgtaaagcgcgcatgaaacaaatctatatctacttgcgtgttatttagctcctttagccgttggtagcatacttgtgcaacgtcaaccaaattgcaaataagacagacctgtgcacccgcgtttgccgctgcgatcattcgctctaacatcgtaaggtcaggtaacatgtcagctaaacaaataggttctggctgaatgctaaagcggggcgggagttgttctggatgagctagcagatcaaaacgttgcgcaccattcacacctcgccagttaatgagtggatatgcggagttattttccactggatctgtatgcagaccataagtatccagaagtttctgtttttgtttcattggtagggttgcggaaagaagaataacactccctcccacatcagcctgagccttgagcactgcctccagcaagccgttcatataggtgtcgtaagcatgaacttcatcaacaattaaaacacttcgaccaattcccaaaccacggataaagcggtgtttaactggcaatacgcttatcaacacctgatcaatcgtgcaaacgccgatttgcccaagaaacactttcttattgctttgactcaaccactgacaacactgaacccacgcttcttcttgcccctgttcagtaatcgcgcgactttttatactttgaaagaggtggttaaaccgactattgccatgagcaagaataagatttggggaactaaataagtggctcgcgctcgcttccattctcgtaagcatagcattcgcggtagcttgtgttgggagggcaaaaataacactatccgcaatttgttgatcaataagtttccaagcataggccagcgctgtttccgttttaccggagcctgtaggtgcctctattaccgtcagcccgggagctactggaagagcatcaactaacacctgtaattgtctgggttgatagccattgtccagtagtgcatgaacaccttcataacatcgcttattacttacaagtccactcaactccaatacccggctcgcatcctgctgtcggtcctggaaatacgttctcagagcatttatgtcggaaggcgcatcctcattaaacagaaaggtattcgttgtagtccaggagcctaaccagtcagcaaggctgcaaaaacctgctaacagactactacaatcaggtggtatatcgtttatagataaccccgctggcgttaaaaataatgcttccagtacagatatccactcctcacgagcctgtttatcttgcgcagcataagatgccagagaagctggcatttcccaacggctcttatcttgatcctgggaatgtaatataaaaccatgatgtcctgtaacggcctctacccatggaaaccaggactcataaggatgaggagcggcatcaaaaaaactgaaaaaatccccgagagattgctcactaagactatcctggttaaaccaatacagaccggctgcaccatgattaaatttacggcacatttgtgtacttggaccattaagacttggcgttgcaggatttaatttcagccaactttctgcacttttatattggaatcgtatatcaaactttccaatatcatgaagagcaatgaaaaataacagccaggccttcaccctctgtttacttagcatttcatttcggcaaaaagtattttgcagtacgacactttgatcccaccagcaatctgcaacagcagcaacatcaaggcaatgataaattaacagatgaatatcatttcctttcgtcaagcttttactggattttccccagtaatggcatatatatttaaaaggttccattaatagcctccctgtttttttagtattatcgatgatatcagcgggctatttttcgatgctgctcataaatatcgaattacagtgatatacacatgtcttgcctccctgcaaagaagagactaacattcgaattgtttgggttcgaacgctggcctcaggttgatagaaatatcgcctggggcttttgtccatctggaacctcgcgaatgcttaacgccagacagcctcaagcacccgacgccattctatacctgataattcttcccgcggcgttcacgtttaaaatcaggaatgctgctcgcaaaataaaaacgcccccatcatttctgacagaggcgtttaatttgtccggcaatatttacccttcgtgtaacccacattccctttttaagccaaagaaacgcgtttcttcttccgccatgccgggttcccatttacgggttgtatgggtatcgcccacgcttaaatatccttcatcccataatgggtgatatttcaggccatgtttttgcaggtactgataaatagttcggttatcccagtcgataatcggcagcactttaaatacgccacgctgaattgccagcaccggtaaattggcacgactgccggattgttcacggcgcaggccagcaaaccaggtttgcgcattcagttctttcagagcccggttcatcggttcgactttgttgatgtcattgtacttttcaatgccttcaacgccctgctcccacagttttccgtagcgtgcttcctgccaggctgcgctttcggtagcacggtacactttcaggttgagcttgagtttgtccgttaactcgtcaataaagcggtaggtttccgggaacaagtaacccgtatcggtgaggatcaccggaatatccgggcgaatttgattcaccagatgcaggctcaccgccgcctgaatgccaaagctggaagaaagtacatattcaccgggcagattatccagcgcccaggctacgcggccttcagcgtccagtttttccagttcggcgttagtttccgccagcgccagaatgcgatctaccttcggcagttcgttcagggcgtttagatcgagtttggacatagattcctcactgtttgccttgcctgatgcgacgctcacgcgttcttatcaggcctacaagaccgggctgatggttaatcccacaaatcacgcgccggatcgagcaccgggcgaatgatgcccgcacgcaccgtaaagtcgccgaagccttcacccgcttcgcgctctttcgcccagcgccctatcagttcatcaaggctcgccaggatttccggctcggtgatgttttctttatacatccgtgggatacgtgtcccaatgcggttgccgccaagatgcaggttgtagcgacccggcgctttacccaccaggcccacttccgccagcatcgcgcgaccacaaccgttcgggcagcctgttacacgcatcacgatatgctcatcgctgacaccatgtttcgccattaaattatcgatgttgtcgataaaagacggcaggaaacgctctgcttccgccatcgccagcgggcaagtcgggaaactcacgcaagccatgctgttttcacgctgcggcgtgacggcattcattaacccgctctctttggcgatcttctcgatcttcgctttctcgctttccggtacaccggcgatgatcagattctggttcgccgtaatgcggaaatcgcctttgtggatcttcgcgatctccagcaggccggttttcagcggacgcgccggataatcaaggatgcgaccattttcgataaacagcgtcaggtgccagttatcatcaatgcccttaacccagccaatacgatcgcctcgtccggtgaactcatatggacggatcggttcaaatttgatccccgcgcgacgctccacttccgctttaaacgtctcaacccccacgcgctccagcgtgtatttggttttggcatttttacgatcggttcggttaccccagtcacgctgagttgtcacgacggcttcggccaccgccagcgtatgctccagcggcagatagccaaactcactcgcggtgcgggcgtaggttttcttgttgccgtgttcgatggaaagcccaccgcccaccaacaggttaaagcccaccagcttgccgttttcggcgatcgccacgaagttcatgtcgttggcgtgcagatcgatatcgttctgtggcgggatcactaccgtggttttgaatttacgcggcaggtaggtctggccgaggatcggttcttcatcagtagtggcgactttttcctggtcgagccagatctccgcatacgcgcgggtacgaggcaacagatgctcagaaatcttcttcgcccactcgtacgcttccgcgtgcagctggctctcgtaagggttgctggtgcagagtacgttacggttcatgtcgttagctgtcgccagcgcatcaagaccgacgctgtgcagcatctggtgcaccggtttgacgttctttttcagaatgccgtggaactgaaacgtctggcggttggtcaggcgaatgctgccatagatggtgttttcaccggcaaatttgtcgatcgcctgccactgtttagtggtaatcaccccacccggcagacgacagcgaagcagcatcgcgtggcgcggctccagcttctgttcagcacgttcggcgcggatgtcgcggtcatcctgctgatacatgccgtggaagcgaatcagcaggaagttgtcgcccttaaagccgccggtcagaccgtcgtttaaatcttccgcaatggtgccgcgcaggtagttgctttcatgcttcatgcgctcggcgtctgtcagttttccttcgaccactaaaggccctggatgtttttcgctcattagtagacatctcgctgataacggcgctctacgcgcagctcacttaaaaattcatccgccgcttcggtgtccatgccaccaaattcggcaatcacttccagaagtgcctgctcaacgtctttcgccatgcgattagcgtcgccgcagacataaatgtgggcaccatcattgatccagcgccacagctccgcgccctgttcgcgcagtttgtcttgtacgtaaactttttctttttgatcgcggctccaggcaagatcgatacgtgtcagcacgccatctttgacgtagcgctgccactccacctggtacaggaagtcttccgtaaagtgcggattaccaaagaacagccagtttttacctggcgcttcgtcggcggcgcgttgctgcataaaggcgcggaacggcgcaataccggtgcctgggccaatcataatcaccggggtttctggattggctggcaggcggaagttatcgttatgttcgataaatacgcggacttcgccctcttcttccacgcggtcagcgaggaagctggaggcaccaccggcacgggcgcggccttccacgtcgtaacgcaccacaccaacggtgacgtgtacttcgttctcgacttccgcctggctggaggcgatggaatacagacgcggcgtcagcgggcgcagcagattaattagcgcttcggcatcaagctgtgccggggagaaacgcaccatgtcaacaatcggcgtcgtcgcggcgtaatgctgtaacttcgctttatcgcccaccagcggcagcagtgtttcactgcgggtaagcgtggcgtaattctcaacaatgttggcggtgttgacggtcagttcgaagtgccactgtagcgcttcgttcagaggcaacgttttgccctcgacggtgacaggttcatcgcctttcagccacagcagttcgacaagttctttcaccagtgccggatcgttctgataccagacgcccagcgcgtcacccggctggtaacgcatgccgctgtcacctaagtcaatttcgatatggcgaacgtctttttcagagttacgcccggtaattttctggttaacagagaggctagccaccagcggcgcgtctttgctgtacgggctggtgtggatttcatttaccgcgccagtagcgacggattggctaggtgccgcgacaggcgcacggcttttaagcgcatcaaccacgcgggcgcgccactcgctggcagcagcctggtattcaacatcggcatcgacacggtcgagcaggcgttcaccacccagttccgccagcttgctgtcgaaatctttcccggactggcagaaaaattcataagagctatcgccgaggctaaacacggcaaacgcggtgttttccagctttggcgcttttttggagaacaggaacttatgcagcgcgacggcttcttccggcggttccccttccccttgcgtactcgtcactacgatgagcagtttttcgctggcgatttgtttgaatttatagtcgcccgcgttcaccagcttaacgttcagttttgctgctaataaatcatcacgtaatgcttcagcaacccggcgcgcattgccggtttggctggcggagataatagttatacccggcatttctgcggctggcgctggcgtcgctgcaagcgcagcaggctgctgattgagtacgccccagaaatagccagaaacccaggcaagctgggtgggagttaaatcggtcgtggccgcctgaaggcgtgccagttgctccgggttcaacggaagcaacgcggaaggtgggacctgtgtcgtcatgcgtcgttatgttccagtaagcaaagctgtttctgcgccctgtcagcgcccataaaacagaagagaaggtaaggttaacggggcaaacggtgtggattaaagacgggatagcgataactaataaccaaatcgactaacctgttttagcaatagtctttaacaacaaaatagattaaccaacctaatgaaaaacaaatgaatttagccaatcattaagataaatcagcgattttgcgcaacaaagtcgttttagataatgcgaaaaaacagcctttccggtactctacggcggttttatcgtcctgtagagaaattatgatgtccaccacgttatttaaagatttcaccttcgaagccgctcaccgcttaccacacgtcccggaagggcataaatgtggtcgcctgcacgggcattcctttatggtgcgactggaaattaccggggaagtcgatccgcatacgggctggattatcgatttcgctgaactaaaagcggcgtttaaaccaacctacgagcgcctcgatcaccattatctcaatgatattccaggtctggaaaacccaaccagcgaggttttagcaaaatggatttgggatcaggttaaacccgttgtgccgctgttaagtgcggtgatggtaaaagaaacctgcaccgcaggttgtatctatcgcggcgaatgataagagtgtgtcggcggtcaatttcccttaagtaacgctatgttagggtgttgtgttctggatatctggggcatgacatggaagacgactgcgacattattattattggtgccggtattgcaggcaccgcttgcgcgttacgctgcgcgcgagcgggtttatccgttttgttactggaacgcgctgaaatccccggcagcaaaaatctttccggcgggcggttatatacccatgcactcgcggaactcctcccgcaatttcatctgaccgcgcctcttgaacgacgcatcactcacgaaagcctttccctgttaacgcccgatggcgtaacgacgttttccagcttacagcccggcggtgaatcctggagtgtattacgtgcacgattcgatccgtggctggttgccgaagccgaaaaagaaggtgtcgaatgcatccccggagcgacggtggatgcactgtatgaagaaaacggcagagtctgtggcgttatttgtggtgacgatattctccgcgcccgttatgtggtgctggcagaaggtgccaacagcgtcctggctgaacgtcacgggttagtgactcgtcctgctggcgaagcgatggcgttggggatcaaagaagtgctgagcctggaaacatccgctattgaagaacgttttcatctggagaataacgaaggcgcagcgttgctgttcagcggcaggatctgtgatgacttacccggcggcgcatttctttatactaatcaacaaacgctcagcttagggattgtttgcccgctctcttcccttacgcaaagtcgtgttccggcaagcgagctgctgactcgctttaaagcgcatccggcagtgcgcccgcttatcaaaaacacggaaagtctggagtatggtgcgcatctggtgccagaaggtggcttgcacagtatgccggtgcaatacgccggtaacggctggctgctggtgggcgatgcgttgcgcagttgcgtcaataccggaatttccgtgcgcggcatggatatggcgctgactggcgcgcaggcggcggcacaaacgctgataagcgcctgccagcaccgcgagccgcaaaatctgtttccgctttatcatcacaacgtagagcgcagcctgctgtgggatgttctacagcgttatcagcatgttccggcgcttttgcaacgcccgggatggtaccgtacgtggcctgcgttaatgcaggatatttcccgcgatttatgggatcagggtgataaacctgttccaccgctgcgccagttattctggcatcatttacgtcgtcacggcctgtggcatctggcgggcgatgttatcaggagtctgcgatgtctgtaacgtaagatgttatcaggagtctgcgatgtctgtagcccgtaatctctggcgcgttgctgatgcgccgcacattgttccggctgactccgttgagcgccagacggcagaacggttgattaacgcctgtccggcaggtctttttagcctcacaccggaaggtaacttacgtattgactatcgcagttgcctggagtgtggcacctgccgtttgctgtgcgacgaaagtacactacaacagtggcgctatccgccttccggattcggcatcacctaccgctttggataaataataaggataatttatgcccctcttacacctgctccgccagaatccggtgattgctgccgttaaagataatgccagcctgcaactggcaatcgattctgaatgccaatttatttccgtgttgtacggcaatatctgcaccatcagtaatatcgttaaaaagattaagaacgccgggaaatatgcttttattcatgttgatttgctggaaggcgcgagtaataaagaagtcgttattcagtttttgaaactggtgaccgaggcggacggcattatcagtaccaaagccagtatgttgaaagcggcaagagcggaaggttttttctgtattcatcgcctgtttattgttgatagtattagctttcacaacattgataagcaagttgcgcaaagcaatccggattgtattgagatcctgccaggctgtatgcccaaagtgctgggctgggtgacagagaaaatccgccaaccgctgattgccggtgggctggtgtgcgatgaagaagatgcgcgtaatgcgattaacgcgggtgtcgtggcgctttccaccacgaataccggggtctggacgttagcgaaaaaattactttgacgggataatcgtaaccaattgaatttggtttgatttgtaggccgcacgccacatccgacattcagcgcctgatgcgacgcttgacgcgtcttatcaggcctacaagtccccaggccagaaccgtaggcaggatcatccggcaacacgttattggcaatctgcgtgaatgtttgtcaccagtgcctccagcaccactttccagtcatcaaccacgccaacatctgcctgactaaataccgcagcgctggcgtcatgattaatcgccaccacaaacttgctattgcgtacgcccgccattaacgctgctgcgccagaagcgccaacaacaatacacacctcaggtgccagcagatgtccggaaataccaatcactttttcagcatcaacgccaccgttcatcactcgcgcccgactgtagcccacttcggctcccagcttttctgccagcatagcgatttcctggttatctgcctctccgccctgccccaccaccagcacccgtctggcctcagctaatgggtcgcgggtaacatttttcagatcctctgtgctaaccagccagtccggaagcgcacccgggacaatgttcagttgttgcattccagagggcaacgtggcgtttttcgctgctcccgcctgacgcgccagggaaaggcatagcgggcgtttttctgtttgcagcgtcgccgttagcgcatttccccagtgggatttgcgcacgcttacggttggaatatctaagctagtcacctggcagatgcttgcaccatgtaaacgccaggccagccgggtgctcagttcatcgccaaacgttcccggcggaaagagaacaacgtccgcaggcgttcgctgccactgttccaccaacgcatccagcacctgttccgccactacaggctgaggttcaatctgccagtgcgccagggtacaaccgctgaaatcctgcgccgccagccagcttgctattgcggcattctcctgatttattgtcacaattgcgatattcatggctgcatcctttggcgtaaatagtcctgccatagcttttgagctttttctgctaccgtttgcccatcaatcagcgtcgctccgcgtcgttgctctgctcttgccagttgcagacactgcatcgctggcatttcggcagcaacagttttacggataatttctgctttccccgcagccattcgctggcgcattcccggtactggcaaggccacttcaccgcactgacgcacggcaatcaccgcaggcaagcgaacccggcaacaacgcaacccatgttcagtacgctgttcgagggtgataaacagcgcgtcgagagtgaaacgctccacctgggtgaagcagggccagcccagcatttccgccagcaaaaatggcgtttgcccattctgcccttcgctgctttggcagccggtaattatcagatccagcggattctgatgctgccattcggcaatatggcgagcgacaaattccggcgcaaagcgcagatctgccgccgtctccagcaatacagcttcctcaaacccaagagccatgagatagcgcagccagtgcaatgcccgttcatcccccatgctcaacgcggttaaagacatcggcgtaccgttttttctctgcgccaacagcagcgcggcagcggcctgttcatcagcaccgagtaaacttcgcagtaggctaatatccggtccgcttttaccctgagccgccgcctgccactctttttccgccagcattccggcatccggttcggctttaaacgctaacagaatgttcattcgcacctcctacatttcccgccgccaccagcgggagggctttagtttctggtgcccatagccaggtcacaacaaaaccaaccaacaacactgtcgccaggagcaataaggtgacttgcattccccactgcgccagcacccacggcagcaggccagtacttaccgccgcgccaagtcgactcatggcagtggcaaaaccgacgcccaggctgcgaatgtcagtaggaaaactttccgcaggcaaaatgcccaccagattactgactgcgctaatggtggtgctgaagagaacaaaaagcagcagcgttaaactactgccggaaggcaaacaggccatgactaccagcgttgccgccagcagcaaaaaacttcccagcaaaaatttgcgatgtgccagcaggtgcgtcagaactaatcccagcagcgcgcccacaattaacaacgcattaagcatcaggctggcagtcagcgcatcttccagaccaatagtctgggcgatagttggcagccaggtataaatcacaaaccatgggattacgaggcagacaaagaagacgctgttaaacgccgtgcgccgccagtaacggctagagaacaaggttttgatgtgtttatgggtcgccgttaccacttcatcgcccagtaaaacatggggaccaaaatagcgatgcacgatagcgtgagcttctgcaaaacgcccctggcgcagtagccagcgtggactttctggcgttccccagcgtaataacgtaatcaacaacgcgggcagagctgcgcttgccagtagccagcgccaggcctccgggttttcggaaataaagtgatgtccggcaatacttgccagcacatagcctacggtccacaccacgctgaatgcgcccagcaaaataccgcgatggcggcgcggggaaaattcagccagcaaggtgtgacctacactataatcgcctcccagaccaatgccaatcaaaatgcgcagtccaataagatgctctggcgtggtggcaaaaaattgtaaaaagctagcaagcgtaatcagcaaaaagctgaaggtgaagattttttgccgaccaatatggtcggagatccacccaagaaccaggctgccaaggaacaaaccaaggagcgcgctgccgccgatcattcccgccataaacggcgtcagttgcatggcgggcgtaagctgaataatggcgtaaccaatgacgccgagaacataaccgtcggtcaggtgtgcgccgaaagtgagcgcagcaatgcggcagtgaaaacggttaagcggtaaatcatccattcgcaccggactagtgttcatctttaccccttcattgtccggtaataagaacggcttctcgcctgagaagccgaaaaggcaacgccccgtcatcgcggaacgctgcctgacacattatttttcaatcggatagatagtacccgtattcataatgccattaggatcgaactgctttttcagcccttccagcaacgcccacgcgctgccgtgttccagtttgctccagtgaacgcgatgtttaccgataccgtggtggtgcaccatgctaccgccgaggcgaatggtttcttcacagatgatcttgttgagcggattgtggtacttgtcgatttcctcttccggcttacagtcaacgacgttgtaatcgtagacgaagtacatgttggtgccgttctgatagctatgagaggaatgaccgcccagcatggtgatgtcgtcggcgtgcgggaactcagtacgaatacggttaataacgctttcgtagatttcgtggatgcagctccagcagccggatacttcggtggtaaagcccatgttgccggttttgaggatctgcacacgttcggcagccactttatccggtccccagttcaggttgttaaaccaggtttcgatcagcttgctgtccacgcgctggcattgcgggtagcgggcaacgatttccgcaatcccttcgcccgtcaccttcgcaatgcgagggttaccttcagccataaagatcagcacgcattttccgtcggcaaaatgggtgaagtgttgggtgccatcttcagcgtcatacaaacgagcgatactcggacgatacccttccaccatgatttcacgcaggatgttgaagccggttttcatgtcttccaggatatagccgtagaagaggttgttttccggggtgaatttaaagattttcactgttacttcagtgatatagcacaatgcaccttcgttgccgatgatgatgtgacgaatgtccgggccagccgcgcggcgtggcacgtttttaatgcgtgtgacggtgccatcagccaatactgcttccagaccaacgaccatatcttcgattgcgccgtagagtgtggagaactgcccgatacttcgggttgctaccaggccgcccatctgcgccagcggcttactctgcggagaatgccccgtggtgtaacctttttcacgcaacgcgttttccagcacttccagcggaacaccacattgcgccgtcgcctgcatattctcaatatcaatattaatgatttgattcatggcggagccgtcgagcaccacgctgttttctacaacagtttccagcccaccttcggtggcggaagcaccggtacgcggcacaccgttaattttgtgcgcattcataaaattcagcacacgggatacttgctctgtggaaccgagttttacgaccgctgccggaatcggcaaagtataaatgccatgaatatccggaaatttacgaaaacggtcaatactgtttttctttaatactgtttcatcggtaattacgcgatctgcaccaacaatttcctttagctggtcgacaatcgctgcgcgagataaagacatagtaattccttcctgataataaaaatggaataatcattaataagagaaaacagaaaccaccgttatgggttagcgcactaaataaccgccatcaaccactaataaatgcccgttgacataattgcttgccggacttgcgaggaatacggctgcgcccattaaatcctgagtatcgccccaacggtttgccggaatatgatcaagaacgcgctgattggtttctggattactgcgtgtcgccagcgtaatatctgttgcataatagccaggggcgataccatttacctgaatattatattgacctagttcatcacaataagctttggtgaacccggcaagagcatgtttagtggcagaatatgcaggactccattgtccacctaagtaagagaacaaactacagatattaataattttgccgcttttctgcgggatcataatttttgcagcttcatagcttaactcgaatgcggcggtcaggttcacatcaatcatcggatcccagtcggcacgaccgaagtccagcaccttattcagcttacaaataccggcattgttaaccagaatatcaactgtaccgaaacgctcacagcaagcagcgataatcttctgcggcgcgccttctgcggtgatacccacctgcatgaagtccacctcaacaccctgtttttcaatcatttcctttgtttcgccgttatctttgacgaaactaggaataaagatatttgcgccagctttggccaacgccatggcaaatgcctggcctaaaccgctattcccaccggtaacaattgcggttttacctttcagggagaaaaaatccatactgaacgcattgagagattcgatactcatagttagctccaatttccgtaaggcaaaaaaaaagaaaggtaacttcccccgcgagagggaagttacctttctcattatctctggtaactggagataatttttagcataagggcataactgctaatgtgatcgtaatcacagtgtgatattcgtattgtcaaataattttaaaaagcagaagcgtgattactctcacacaacacctctgctttccatgttatttattatttcaattactagagacctgagaaaagtaatccacctgaaagggcggcttacttttctcttttttttgtctattacaaatgggaatacgatatgcaacacaacagttatcgccgttggataaccctcgcgataattagttttagcggcggcgttagtttcgacctggcttatttacgttatatttatcaaattcccatggcgaaatttatgggattcagcaataccgagataggtttaataatgagtacctttggtattgcggccattattctttatgcccccagcggcgttattgccgataaatttagtcaccgcaaaatgattacttccgcgatgatcattaccggattactgggtctgttaatggcaacgtatccaccgctgtgggtaatgctctgtattcagatcgcctttgcgataacgacgattttaatgctgtggagcgtgagcattaaagctgcaagcttgcttggcgatcatagcgagcaagggaaaattatgggctggatggaagggctgcgcggcgtcggtgtaatgagcctggcggtgtttaccatgtgggtcttttctcgctttgcaccggatgacagcaccagcctgaaaacggtcattatcatctatagtgtggtttacatcttgttggggattctgtgctggttttttgttagcgataacaacaacctgcgcagtgccaataacgaagaaaaacagagtttccagcttagcgacatcctggccgttttgcgtatcagcaccacctggtattgcagcatggtgatttttggcgtcttcaccatctacgccattctgagttactccaccaactatctgaccgaaatgtatggcatgagcctggtggcggcgagctacatggggattgtgatcaacaaaatattccgcgcgctgtgcggcccacttggcggcataatcaccacctacagcaaagtgaaatcccctacccgcgtgatccaaatcctttccgtactcggcctgctgacgttaactgccctgctcgtcacgaactctaacccgcaaagcgtcgcgatggggattggcctgattttactgctgggattcacctgttacgccagtcgcgggctgtactgggcctgccctggcgaagcgagaacaccgtcttacattatgggcaccacggtaggtatttgtagcgtgattggattcctgccggatgtcttcgtttacccaattatcggccactggcaagacaccctgcccgctgcagaagcctaccgcaatatgtggctgatgggcatggcggcgcttggcatggtgattgtctttacctttttgctgttccaaaaaattcgtactgctgatagcgcccccgcaatggctagcagcaagtaagccaggaaaattacaggagaaaaatcatgagcaaaaaatacatcatagggattgatggcggaagtcagagcacaaaagtggtgatgtacgatctggaaggtaacgtggtttgcgaaggcaaaggcttattacagccgatgcacacgccagatgccgatactgcagaacatcctgacgacgatttatgggcaagtttatgttttgccggtcacgatttgatgagtcagtttgccgggaataaagaagatattgtcggtattggtctgggatccatccgttgctgccgtgcgttattgaaagccgatggcacgcctgctgcgccgttgattagctggcaggatgcacgcgttacacgcccttacgaacacactaaccctgacgtggcatatgtcacctcttttagcggttatctgacgcatcgcttaaccggcgagtttaaagacaatatcgccaactattttggtcagtggccggtggattataagagctgggcatggagcgaagatgctgcggtaatggataagtttaatatcccccgtcatatgctgtttgatgtgcaaatgcctggcaccgtcctcggacatatcacaccacaagccgcactggcgacacatttcccggcaggactgccggttgtttgtaccaccagtgataaaccggtagaagctctgggggccggattactggatgatgaaacggcggtaatttctcttggcacttacatcgcattgatgatgaacggcaaagcactgccgaaagatccagtagcgtactggccgattatgtcttctattccgcaaacattgctgtatgaaggttacggtattcgcaaaggcatgtggacggtgagctggctgcgcgacatgctaggcgagagcttaattcaggatgccagggcgcaggatcttagtccggaagatttactcaacaaaaaagcttcttgtgtgccgccaggctgtaatggtctgatgacggtgctggactggctgaccaatccgtgggaaccgtacaaacgcgggattatgatcggctttgattccagcatggattacgcatggatatatcgtagcatactggaaagcgtggcgctgacgctgaagaacaattacgacaatatgtgtaatgaaatgaatcactttgcgaagcatgtgatcattactggcggcggtagcaacagcgatctgtttatgcagatttttgccgacgtgttcaaccttccggcacgacgtaacgccattaacggttgtgcaagcctgggggcagcgattaatacagcggtaggtctggggctatacccggattacgcaacggctgtcgataacatggttcgcgtgaaagatatctttataccgattgagagcaatgccaaacgctacgacgcgatgaataaaggcattttcaaagacctaaccaaacatactgatgtgatcctgaaaaaaagctatgaagtgatgcatggggaattggggaatgtggatagcatccagagctggagcaatgcgtaagtgaggaaggccgggcgggaaactgcccggcctgaacatacctgaatggttatccccgctgacgcggggaacataagttcgacaacttaaaaaatgataacaagtccggtttatccccgctgatgcagggaacataataaaaactttaactagttcggtttatccctgtttttacaaggaatattaactacactcgatgtctttagaataaaagacaatacgaatcgcactttatcaattttcacttaaagtatgaactggatatctttattcataagaactattcatcaacagcgtatagaggcggttatgtaaaaccactcattagcctcaaaacaaagacaaacttccagatttattacttaaccaatgaataacaagcttaaaaaatatactgttattctaaagaaaaaattaacaggcattaattcaatattaaaaaaataatagattaaaatttcttaacgatttaagaatcatacaaataacactttgattaaatttaattttttgtatcgataattgtgaacctctctggcatggagaactattttgaacatgaggtgttacgtggatatgttgcttattacaagtactgctaatataaaaacttgagaaagagataacgggttatatggtggtttatccccgctggcgcggggaactcgacagaacggcctcagtagtctcgtcaggctccggtttatccccgctggcgcggggaacacctgttttcgcaaatctatggactattgctattcggtttatccccgctggcgcggggaacacgggcgcacggaatacaaagccgtgtatctgctcggtttatccccgctggcgcggggaacactggctctgcaacagcagcacccatgaccacgtcggtttatccccgctggcgcggggaacacgaaatgctggtgagcgttaatgccgcaaacacaggtttatccccgctggcgcggggaacacattacgcctttttgcgattgcccggtttttgccggtttatccccgctggcgcggggaacactctaaacataacctattattaattaatgattttttaagccagtcacaatctaccaactttatagtatcacacaaacaacacatccattatgttaaagagcacttaatccattgattaaaaaggtaaatatttaaaataactctatacaaactaaaatctaccaaactttaccgcaataattttcactccagcgaaaaattaatgccacagaatttgtagagaatgctaatgattagccctggatgggtaaaatggaggagttttcagaggcgacaaacaatataaatgagtagaagtctttacaggttccacccatttataacgcttataaatgtttaatcaggcaatatttagatatttatgtgtttgcatgctcaaacgccaattacgcgcaatgcaggtttcaatgcacaaacgtgtggcatcatccttttggctaatcggctgcagtgcaatgactcgcggtttatcatcggtcagcgttgccagtagttcatccagtgcttcaatatcgcgtacgcgccccactggatgcttgatttcgttggctcgctccagtgcctgactcaacacttcatagccgccgcgcatgttcagctttgggcttacggtaacccaggtattcggtgtgcagcgtacctcatgagtaccactggtttcgatctggcagctaaaaccgttcttttcgagcagatcagtcagtggcagcaaatcatgaatgcaaggctcaccacccgtaatcaccacatgccgcgcggtgtatccctggcgaccaatgacagccagcaaatcttcactgctcgcagccccccacttatcactctctttggtcttcgccagaatgctgaaaagggagacttcccgatcctcaagcttttcccaggtgtgtttggtgtcgcaccaggcacagccaaccgggcatccctgtaaacgaataaaaatggcgggaacgccggtaaagtaaccctcaccttgcagggtctggaacatctcgttaatcgggtactgcatagcattctctgtgaagtggataattgttaattattgcagatcctgccacaacaatcatgtcttattaacattctgttacaggcaggtttaaagaaaaatgcgaaacatatcgttaataattaaagggagtaacgtattatgtcagaagaaaataaagaaaatggatttaatcatgtcaaaacattcaccaaaattatatttattttttctgtattagtttttaatgataacgaatataaaattaccgatgccgccgtcaatttatttatccagatttaatgagaaatttataatgcgctatttcatactaatgttcactttcgtatgttcctttgttgcagcccaaccaactattgtcccacaattacagcaacaagttacggatcttacgagtagcttaaacagtcaagaaaagaaagaactgacgcacaagttagaatctattttcaataatacccaagtgcaaattgccgtattaattgttcccacaaccaaagacgagacaattgaacaatatgctacaagagtttttgacaattggcgtttaggagatgccaaacgtaatgatgggatactgatcgttgttgcctggagcgatcgcactgtccgcatccaggtaggttatgggctggaagaaaaggtaaccgatgctctggctggagatatcatccgtagcaacatgatacccgcatttaaacaacaaaaattagctaagggattagagctagctataaacgctttgaataaccaactcactagtcaacaccaatatccgactaatcctagtgaaagtgaaagtgcgtcttccagtgatcattattactttgctattttttgggtatttgcagtgatgttcttccctttctggttttttcatcaaggcagtaatttttgtcgcgcatgtaaaagtggagtctgtattagtgcaatctatcttttagatttattcctgttctccgataaaattttttccattgctgtattttccttcttttttactttcaccatatttatggtctttacctgtttatgtgtacttcagaaaagagcatctggtagaagttatcatagtgacaacagcggttccgctggaggcagtgatagcggcggatttagcggcgggggcggttcttctggaggtggcggcgcatccggccgctggtaactcaaccataaaaaatgccagcccggaggctggcatttttaaatcagataaagtcagtcttatgcctggcctttgatctctttacgaccgttgtacggtgctttttcgcccagagcttcttcgatacgaatcagctggttgtatttagcaacacggtcagaacggctcatagaaccagttttgatctggcctgcagcagtaccaacagccaggtcagcgatggtagcgtcttcagtttcgccagaacggtgagagataactgcagtgtagccagcatctttcgccatcttgattgcagccagagtttcggtcagagaaccgatctggttgaatttgatcaggatggagttagcgatacctttttcgataccttctttcaggatcttggtgttggttacgaacaggtcgtcaccaaccagctggattttgtcgcccagaactttggtctggtatgcgaaaccgtcccagtcagattcgtccagaccgtcttcgatagaaacgatcgggtactgtttggtcagttcttccaggaagtgagtgaattcttcagaggtgaacgctttgttgccttcgccagccagaacgtatttaccatctttgtagaattcagaagctgcgcagtccatcgccaaagtgatgtctttgcccagttcataaccagcagctttaacagcttcagcgataacagccagagcttcagcgttggaacccaggttcggcgcatagccaccttcgtcaccaacagcagtgttcatgcctttcgctttcagaacttttgccaggtgatggaaaacttcagaacccatgcggatggcttctttcacagttttcgcgccaaccggctgaatcatgaattcctggatatcaacgttgttgtcagcgtgctcaccaccgttgatgatgttcatcatcggaaccggcatagagtatttgcccggagtaccgttcagttcagcgatgtgctcgtacagcggcatacctttagcagctgcagcagctttggcgttagccagagatacagccaggattgcgttcgcgccgaatttggatttgttttcggtgccgtccaggtcgatcatgatcttgtcaatgccagcctgatctttagcatctttgccaatcagcgcctgagcgatcgggccgtttaccgcagcaacagctttggttacgcctttacccaggaaacgggatttgtcgccatcgcgcagttccagagcttcacgggaaccagtagaagcaccactcggagcagctgccataccgacgaaaccaccctccagatgtacttcggcttcaacagtcgggttaccacgggagtcgatgatttcacgaccgatgatttttacgattttggacattaggttttcctcaagtcactagttaaactgaaactccagacaaacaacgcgtacccagggtacgcgttgccgctctaacttttttacttacttcgcctgacgtttctggaactcgctggcggctttcacaaagcctgcaaacagcgggtgaccatcacgtggagtagaagtaaactccggatggaactggcaagccacgaaccacgggtgattcggaacttcgatgatctcgaccaactgatcatccccggaacggcccgcaacgcgcagacctgcatcttcaatctgtttcaacagcatgttgttgacttcgtaacggtgacgatgacgctcaacaattgtcggcgcattgtacagctggcgaaccaggctatcgtcaaccaactggcactgctgtgcgccgagacgcatggtaccgccgagatcgctcttctcgctacgaacttcaacgttgccgttttcatcgcgccactcggtaatcagcgccacaaccgggtacttacagtctggcacaaattccgtagagttggcgttctccatgttggcaacatggcgagcgtaatcaattaacgccacctgcatacccaggcaaatgcccagataaggaatattgttctcacgcgcaaaacgcgcggtcgtaatcatgccttctacgccacgatagccgaaaccgccaggtacgaggattgcgtccagacctttaaggatttcaacgccgcgcgtttcaacatcttgactatcgatcagtttgatgttgacgctgacacgattcttcagcccaccgtgtttcagtgcttcgatcacacttttataagcatccggcagttcaatgtacttgccgaccataccgatggtgacttcacttaccgggttcgcttcttcgaagataacctgttcccattcggacagattcgcttccgggcagtttaagctgaatcgtttacaaatataatcgtccagcccctgagatttcaacaggcccggaattttatagatggaatcgacgtctttcagagaaataaccgctttttccggaacattacagaacaatgcaatcttcgcacgttcgttcgccggaacagcgcgatcactacgacaaatcaggatgtcaggctggataccgatggagagcagctcttttacagagtgctgagtcggtttggttttgacttcaccagacgctgccatgtacggcaccagcgtcaggtgcataaacagagtgtgctcacggccaatttcaacagccatctggcgaatcgcttcgaggaacggcaaggattcgatatcacctactgtaccgccgatttctaccagtactacgtcatgaccttcgccaccttccagcacgcgctctttgattgcgttagtgatgtgcggaataacctgcacggttgcgccgaggtagtcaccgcggcgttctttacgcagaacgtcagagtagatacgacccgtggtgaagttgttgcggcggctcattttggtacgaatgaaacgctcgtagtgccccaggtccaggtcggtttcagcgccgtcttcagtaacgaacacttccccgtgttggattgggctcatagtacctggatcgacgttgatgtacggatccagtttcatgatggtcacattgaggccacgggcttcaagaatggctgcgagggaggctgcggcaatgcctttacccagagaggatacgaccccgccggtcacaaaaatatagttcgttgtcatgctgaacctgagaagttaggttgaaaagacgatggaataaccaagacgggaaagcagtatacccgaacatgacctgtgccacaaactttcattatccctcctcttcgccagcgcactattgaaatcaggagtgagaaaatagcccctttggggtaaatgtttttgacgcaaatcaagcgcttgtcatttaaaaaatgacacaaatggcgcttgaccgcgtaattcccttagagatcaatttcctgccgttttacctgttgccagacttcttccattgtttcgaggtcaacacctgtcatttccagtccacgcgcggcaacaatacgctccacttcgcgaaaacgacgctcgaatttttcgttcgctttttgcaatgcgatttctgctttcgtccctaaatggcgagccagattaaccgtggcaaacagcaggtcccccatttcctcctccagtttagcctggtcgacaacagcctgccgcgcttcgtacatcacctcgtcgatctcttcgtagactttatcgactaccggaccaagcgtcgtccaatcgaagccaacgttggcgcaacgtttctggattttttgcgcacgcattaaagccggtaaactacgaggaatatcgtccagcgcgctatgctgcgctttctgcgcgcgctcttcggttttgatttgctcccaacgggcaagcacttcactactgttttcggcagaactatcagcaaaaacatgcggatggcgacgctctaatttatcgctaatagcagcgcaaatatcattaaagtcaaagcgcccttcttcctgagccatttgcgcgtaaaacaccacctggaatagcagatcgcccagttcaccgcgaagatcgtcaaaatcttcacgggcgatggcgtccagcacttcgtaggtttcttcaagggtgtaaggcgcaatggtggcaaatgtctgctctttatcccacgggcagccgttttccggatcgcgcaggcgctgcataatagtgagcaaacggtcgatttgattcattgaattgtcctgaaaattgcgggtctgtcaggtggaaacctgtgaccagaatagaagtgagttagtaacattacccaatcagtacgttaattttggctttaatgagttgtaattcctctggggcaactgttcctttcttcgttgctcctcttgcccgccaggcgatactttttacctgatcagctaacgctacgccatcacgttcctgaccggataaaacaacttcgaacggatatcctttactttgcgttgtacaaggaacacacagacacatacctgttttgttgttgtacatgaaaggactcaggacaacagctggacgatgtccagcttgctcgctaccttttgtcgggtcaaaatcaacccaaatcagatcgcccatatcgggtacgtatcggcttaccattaccagacttccttatctttcggctctccccagtcgatattctcgtggaggttttccggcgtgatgtcgttgaccagttcagcaagcgtaaatacgggctctttacgcactggctcaataattaatttgccatccaccaggtcaatcttcacttcatcatcaatattcagattgagcgcctgcattaacgtagccgggatccgcaccgccggactatttccccaacgctttacgctactgtggatcataaccctttcctcaaaccgctatcatatgtagatacagtatatatcaatctacattgtagatacgagcaaatttcggcttaactcccgtgcaaccgacgcgcgtcgataacatccggcacctggttgagtttacccagcacgcgccccagcacttgcaggttgtaaatctcaatggtcatgtcgatggtcgccagttgctgtttggtgtcgctacggctggcaacgccaagcacgttcaccttctcgttggcgagaatggtcgtgatatcacgtaacaacccactacgatcattagctaccacgcggaccaccaggctatatccggcggagtagctctcaccccataccgcgtcaacaatgcgttctggcgcatgggagcgcagttccgccagttgttcgcaatcggcgcggtgtacactaataccgcgcccctgggtaatgaagccgacaatctcatctccaggaatcggctggcagcagcgcgcgatgtggtgcatcaggttgccaacaccttcgactaccacgcgaccgttatctttactgcggttttgcggcgtgtagcttttttgctgaagttgcttcagcgcggcggcgtcctgctcttcggcactcggcttattaaattggctttgcaggaagttcaccatctgattgagacggatatccccgccaccaatcgccgccagcaactcgtcgacatcattgaagttgtaacgcggcagcagatgtttttctgcttctttcaggctgatccccagatgttccagctcgtcgtcaaggatttgccgcccagccagaatgtttttgtcacggtcctgtttacggaaccaggcgtgaattttgctacgcccacggctggttgtgacgtaaccgaggtttgggtttaaccagtcacggctggggttcggctgtttctgggtgataatttcaatctggtcgcccatctgcagctggtaggtgaacggcacaatgcgcccgccaatttttgccccgatgcagcggtgtccgacatcactgtggatgtggtaagcgaagtccagcggcgtacttcccgcaggcaaatcaacgacatcacctttcggcgtaaagacgtacacccggtcgtcaaagacctgactacgtacttcgtcgagcatttcgccggaatcagccatctcttcctgccacgcaatcagtttacgcagccaggcaatccggtcttcatgtccgctacgtgcgccgccagcagccgcgccctctttatatttccagtgcgcagcaacacccaactctgcatcttcatgcatctgtttggtgcggatttggatctcaacggtttttccacccggccccagaaccacggtatgaatagactgataaccgtttggtttcgggttagcgacgtaatcgtcaaactcatccggcaggtggcgatagtgagtgtgcactatccccagtgcggcatagcaatcctgtaaacgctcggcgacaatacgtaccgcacgcacatcaaacagctcatcaaaggcgaggttctttttctgcattttacgccagatgctgtagatgtgtttcggacgaccatacacttccgctttaacgccttcagctttcatctcagcgcgcagatgaccaacgaactcttcgatgtagtgttcgcggtcgagacgccgttcatgcagcagtttggcaattcgtttgtattcggttggatggaggtaacggaagcagtaatcttccagttcccatttcagttgtccgattccgagacggttagccagcggtgcgtagatgttggtacactcttttgccgccagtacacgttcatcttccggcgcatcttttacttcgcgcagatgagcaatacgctccgccagtttgatgactacgcagcgaaaatcatcgaccatcgccaataacatccggcgaacgttatcgacctgttcggaggaaacagaatcagtgtgcgtcgctttcagctggcggatcgccgccatatcacgcacgccgtgaataaggttaacgacgctcttaccgacgctctcacgcagcacatcttcgctgactacgttggcatccgccagagggaaaagcagcgccgcccgcagcgtgtcaatgtccatacttaatgtgctgaggatctccaccatctcaacaccacgccacaataacagactggcatccggatgcccctgcgtctgttgcagacaatacgcccaggtttcggctaagcactcacagctcttctggctggtaatacccagacttgcgatccatttttccggatcaaattcaccagccttattgatatgtgcacttcttaccgcaaccatcgtcctctcctttagggaccagacctgccgaaatcggcaaatcgcaattatttaacgcggctgaaaagtaccatgctttccagatgtcccgtgtgtgggaacatatccagcatcgccagtcgcgcaatggtatatcctgcttttaataacgcttcgctatcccgagccagcgttgcagggttacaggatacataaactatacgaataggttccagttttataatttgctgcataacacctgcggcacctgctcgcgccgggtccagcaacactttatcgaagccgtttttcgcccacggctgctttgtgacatcttcttcaagattttcgtgataaaacgtcacattctgtaagccattaagacgcgcattctgctggcctttttccaccagcgccggaacaccttctacaccgaccacactggcagcttgtgtcgccaatggcagtgtaaagttgcccataccgcagaacagatccagtacgcgatcttcaggttgcacatccagccattccaacgcacgcgctaccattttttggttcacacccgcattgacctgaataaaatcgcgcgggctaaaagttaagcgcaacccgttactgtcataccagggcatctcaccagagacggtttcgagtatctcactatcgggggcgagatacagatccaggccttcagaatggctaaagcgttccagtttttcgcgatctgcgctacttagcggtgcggtatggcgcaaaatcatcagcgtgccgctggttgcctgtaccagttcaacatgaccaagatggcgcatagcttgtaagctgcccagacatgccctgactttgggcagcaatgcttcaagttggggcgctaaaatggggcattgtttgacgtcgacaatgtcactggagcccgctttgcgaaaccccatctgaagttgctgtgttttcggtaagtagttcagacttaaacgcgcgcgacggcgatagccccagggaacatcggcgatcacttcagagacatcgtgtttcattaatcgggcgagtgccgcacttttgcttcgctgctgtaaatccacgctggcgtgttgttgctgacagccaccgcatacgccaaaatgaggacagcgtggcgtttcgcgttccgggctatcgcttaaccggcgtacgactttagcgcgggcatactgttttttatcttcagtaacagtaacttccgcgttttcctgcggcaataatccggggataaatagcgttttgccgttatgtcgcgccacgccctgaccaaaagagtcgaggtcgttgacactaacggttatgatctgacgcgtcgtcgtgcgtcgttttgcagagtagaattgcgccattggcgagactttctcaatttaacagtgtgaccttaattgtcccataacggaactccatgaccaactacagcctgcgcgcacgcatgatgattctgatcctggcaccgaccgtccttattggtttattgctgagtatctttttcgtcgtgcatcgctataacgacttgcagcgtcaactggaagatgccggtgccagcattattgagccgcttgcagtttctactgaatatggcatgagcctgcaaaatcgcgaatctatcggtcagttaataagcgtactgcatcgtcgccattccgatattgttcgcgcgattagcgtttatgatgaaaataaccgactctttgtcacctccaattttcatcttgatcccagtagtatgcagctcggcagcaacgtgccgtttcctcgccagctcactgtcactcgtgacggcgatattatgatcctccgcacgccgattatttctgagagttactcccccgacgaaagccccagtagcgatgccaaaaatagtcaaaatatgttgggatatattgcgctggagctggatcttaaaagcgttcgcttgcagcaatataaagagatctttatttccagcgtgatgatgctgttttgtatcggtattgcgcttatttttggctggcgcttaatgcgcgatgtaaccggtccgattcgcaacatggtgaataccgtcgaccgcatccgtcgcgggcaactcgacagccgggtggaaggatttatgctcggcgagctggatatgctgaaaaacggtatcaacagcatggcaatgagcctggctgcttatcacgaagagatgcagcacaatatcgaccaggcgacgtccgatctgcgtgaaacgctggagcagatggaaattcagaacgttgagttagatctggcgaaaaagcgcgcccaggaagcggcgcgtattaaatccgagtttctggcaaatatgagtcacgagctgcgtacaccactgaatggtgttattggctttacccgcctgacgctgaaaacagaattaacaccaacgcagcgcgatcacctgaatacgattgaacgtagcgcaaataatttgctggcaattattaatgatgttctcgacttcagcaaactggaagcaggtaagctgattctggaaagtattccattcccactacgcagcacgctggatgaagtcgttactctgctggcacattcttctcacgataaagggttagaactgacgctcaatattaaaagcgacgtgcctgataacgtgatcggcgacccgctgcgattacagcaaatcatcactaacctggtggggaatgcaattaaattcaccgagaatggcaacattgatattctggtagaaaaacgtgcgctgagtaataccaaagtgcagattgaagtgcagattcgggataccggcattggtattcctgaacgcgatcaaagccgcttattccaggccttccgacaggctgatgccagtatttcccgccgtcatggtggcaccgggctggggctggtgattacacaaaaactggttaatgaaatgggcggcgatattagcttccatagccagccgaatcgcggtagtactttctggttccacattaatctcgatctgaacccgaacattattatcgaagggccatccacccagtgcctcgcaggtaagcgcctggcctatgtcgaaccaaactccgcagcagcgcaatgcacgctggatattttaagtgaaacgccgctggaagtggtttatagcccaacgttctccgcgctgcctcccgcgcattacgacatgatgttgttaggcatcgcggtgaccttccgcgagccgctaacaatgcaacatgagcgattagcgaaagcggtaagcatgaccgatttcctgatgctggcacttccttgccatgcacaagtcaatgctgaaaaactcaagcaagatggtatcggcgcgtgtctgctgaaaccattaacacctacacgcctgttgcctgccctgacggaattttgtcatcacaaacaaaacacgcttttgcctgtaaccgatgaaagtaagctggcaatgacagtcatggcggttgatgacaaccccgctaacctgaaacttatcggcgcattgctggaagatatggtgcaacatgtggaactttgcgatagcgggcatcaggcggttgaacgggcgaaacagatgccgttcgatttgatcttaatggatattcaaatgccggacatggatggcattcgggcctgcgaactcatccaccaactcccgcatcagcaacaaacgccggttatcgcggtaacggcgcatgcaatggccgggcaaaaagagaagctgcttggcgcagggatgagcgattatctggcgaaaccgattgaagaagagcgattgcataatttgttgttgcgctacaagcctggcagcggtatttcctctcgcgtcgtgacgcccgaagtcaacgaaattgtggtgaacccgaatgcgaccctcgactggcaactggcactacgccaggcagcaggaaaaaccgatttagcgcgcgatatgctgcaaatgttactcgatttcctgcctgaagttcgcaacaaagttgaggaacagctggttggagaaaacccggaaggcctggttgatttgattcataaactgcatggcagttgcggctatagcggtgtgccacgtatgaagaatctctgccaactgatcgaacaacagctacgtagcggtactaaagaagaagatttggaaccggagctgctggaactgttggacgagatggataatgtcgcgcgcgaagccagcaaaattctcgggtaatggatgtcttgtcgagtagcaatcggctttttatgacgctggtttcagattggtgacaaagtgcctgtgtttatgccggatgcggcgttaacgccttatccggcctacaaaaccaattaaattcaatgaattaaaaaatgatgtagacctgatacatagcacaacaggctattttgcgtttagcatcagtctcaaaccggctccagatagagccggttttggttttctgtcttaacgcaccatgcacgggcgcttgttatcgaacgtccagccaggaatcagatactgcattcccatcgcatcgtcacgcgcgccaagcccgtgtttctgatacagctcatgggctttcatcacttgatccatatcgatttctacacccagccccggtttttctggcacctgtaccagcccgcctttgatctcaaacggttctttggtcaggcgctgattgccttcctgccaaatccagtgcgtatcaatagcagtaattttacccggtgcagcggcggcaacatgggtaaacatcgccagggaaatatcgaagtggttgttagagtgactaccccaggtcaggccaaattcatggcacatttgcgccacacgtacgctaccttgcattgtccagaaatgcggatccgccagcgggatatcaacggattgcagggagagcgtatggcccatttgccgccagtcggtggcgatcatattggttgcagtcggtagacctgtcgcgcgacggaactctgccatcacttcacgcccggagaaaccttgctccgcaccacacggatcttctgcataagccaggctacctttcaggtatttaccgattttaatcgcttcgttcaggctccaggcaccgttaggatcgagcgtaatacgcgcctgcgggaagcgttgcgccagtgccacaatagactcggcctcttcttccccggccagtacaccgcccttcagtttgaaatcgttgaagccatatttttcatatgccgcttccgccaggcgcaccaccgcatccggcgtcatcgcttcttcatgacgcaggcgataccagtcgcaactgtcatccggctggctttgatacggcagcggcgtggctttgcgattaccgacgaagaacagataaccgagcatttcgacttcgctacgctgttgaccatcgcccagcaggcttgccacgtttacccccagatgctgccccagcagatccagcattgccgcttctatcccggtaactacatgaatagtggtacgtaggtcaaatgtctgcaaaccgcgcccaccagcatcacgatcggcaaaagtattacgcaccagcgtcagaacgtttttgtattcacccagcgttttacctaccaccagcggaatcgcatcttccagcgttttacggattttctcgccgccgggaatttcccctacgccagtgtgaccagaattatctttgataatcacaatattacgcgtaaagaacggtgcgtgtgcaccactcagattcatcagcatactgtcatgacccgccaccgggataacctgcatttcagtaacaacaggcgtcgtaaattgagaactcatatttatgtcctttttcagaatcaatgacggccgaaaacgggacgtttacggtcaaaggtccagccggggatcaggcactgcatcggacctgcgtcgttacgcgcaccgccaggcagacgtttataggcctcatgtgccttttgtacctgttcccagtccagttccacgcccagaccgggcgcatcaggaacggcaatttttccgtttttaatctccagcggattttgggtcaggcgacaatcgccctcctgccaaatccagtgggtatcgatagcggtaggattacccggtgccgccgcgcccacatgggtaaacatcgccagagagatatcgaaatggttattagaatggcagccccaggtcagcccccagtcgtcgcaaagctgcgccacacggactgcaccggaaagcgtccagaagtgcggatcggcaagtggaatatctaccgcattgagcatcaccgcatgacccatttcgcgccagttggtggcgatcatgttagtcgcgacgggcaagccggtcgcccgtcgaaattccgccatcacttcacgtccggagaagccctgttctgcgccgcatggatcttcggcataggtaagaacatcattcagccctttgcataaagaaatggcttcatcaagcagccatgcaccgttgggatcaacggtaatccgcgcatccgggaagcgtttcttcaatgcacgaacagtgtcgatttcttgctcgccaggtaacacgccgcccttaagtttgaaatctttaaagccgtagcgatcctgactggcttccgccagacgcacaacggcttcgctgttcattgctttctgatgccgcaactgataccactcatggttgcccggcgtattttccacataaggaagatcggttttggtccgatcaccgatataaaacagataaccgaggacggtaatagcctcgcgttgcttgcctggccctaacagttcgcagaccggaacattcagcgccttacctagcaggtcaagcaaagcggcttccagcgccgccacggcgttaacgcgtaattcaaaggtccaggcacctttaccgaaggtatcaaaatcggcggcctgattacctttatgcacctgctggaccactttattcagtcgcgcaacttcctggcccagaaccatcggaatagcatcgacaagcgtctgataaatcacatctccgcccggcgcttcaccaatgccggtatgcccggcgttatcggtgagtaccacaatattgcgggtgaaatatgcgttatgtgccccaccaatattaagcaacatgctgtcatgcccggccaccggaatgactttcatatcagtaataacaggactggattgtgtcgccatcttattgccccgcaacaggtttcaactcgatacgcttgatatcgcccaccagcaccaggtagctcagtaccgcgattaaggcatgaacaccaacataaatcagcgccccattaaagctgccagtcgtgccaacgatataaccaattgcgattggcgtgacgatgccagaaatgttaccgaacatgttgaacaggccaccggaaagaccgctgatctcttttggcgcggtatctgccattactgcccaacccagcgccccgatgcccttaccgaagaaggccagcgccataaagccgatgatcatccactcaacgttgacgtagttgcagaacaccatcaccatgctcagcaacatgcccattacgatcggtgttttacgcgcaatgttcaggcttcccgtgcggcgcatcagccagtcggaaataatcccacccagcacaccgccgataaaaccgcaaaccgccggaacggaagccacaaagcccgctttcagaatgctcatcccgcgtgcctgcaccagataaaccgggaaccaggtaataaagaagtaagtcagggcgttgatacagtactgaccgatataaacgccgatcatcatccgactccctagcagctgtttgatctgcccccacttcacgctgaacggcactttaactttggtgttttgctgatccatattgatcagcgcaccacccgcggcgatgtactccagctctttcttatttacccccggatgttgatttggctcgtggatgactttcaaccagataaagctgatgacaatccccagaccgcccataaagaagaagacgtgactccagcccacttcatgcgtcagccagcccataatcggcgcgaagatcaccgttgcgaagtattgagcggagttaaaaatgctcaccgccgttcccctttcctgcgccggaaaccaggccgcaacaatgcgactgttgccggggaaagatggcgcttcagcaagcccgaccaggaagcgcagcgtaaacagggcaacgataatgccgaatccactaaagatatcgacgaagccttgcagcaaggtaaacatgctccagataaagatgctccagaagtagacgcgtttactaccaaaacggtccagcaaccagccaccagggatctgcccgataacataagcccaactgaaagcagagaacacatagcccattcccacgggatcaaggccgatatctttggccatttcgctaccggcgatagagagcgtagcgcggtcgccgtagttgaaggatgtgacgataaacaacatcaccactatccagtaacgagcatttgtgcgtttttccacactgctcgcagcctgacttaaagaactcattgttgcactcctgaaaattcgcgttagccacgctcactctggactgcgacatcgccaggaaatcagaggtgacgtagggtgttttttgccgtttttataggtcgttcgccgaatacggcgcgtgtttatatctggcaatagcagtataaaaagcgcgccatagcggctcaccgtgcaacaacacaacattaatgcgttcaatgaggcccgattttggcattagccctggacggtggaatccacttcacggaaatgaaaacaagaacaagaaaggaagggttaaaacgaagaaataaagaagagtatgaaatggatcgcttgactccaggcaaacgccagtaaaaatccgcgctatgaagcagtttttactggcatttgcctgaaaagattcgattcagcaccgctaaaacgacatttaccgctcgctgaacatatcaggacaacagcgtgccccactgttcgacccacggattactttccgtttccggttccgggttctcactggcgtcaatcaacagcatttcgccaacccgctgagcgctctgttcctgcaacaaggcatcgaactgtttgccgccattgcagaaattcacataactactgtcgccgagcgcaatcacgccataacgcagattcggctggaagcccagactatctttgattccctgaaagagtggcacaatgctatcaggaaggtcgccctgcccggtcgtggacgtaaccaccagaacatacttatcctgatagggcagccagtcgcttaattcaggatcttcaaataccgttgctttgtggccctgcgcggtcagaatcgcttccgcttcttcggccactaacagactattcccgtacatggtgccgacaaaaataccaatttccgccataccgttttctccctggattaggaacttatctctccatcctgaccgcttggcgcactgaactcaaccctttcattttcaggaagcagaccgcgccagccaaattgacttaacgcctgcatccaggtgtcgtccaggcccgcgtgaatagtcagcggctcgccagtaaaaggatgcgtcaaactcaactgactggcatgtagcattaaccgctggaggccaaaatgctcagcaccgctgcgattctggcgtaaatcgccatgtttgctatcgccaataatcggatgacgcaaatgggcaagatgtcggcgaagctgatgtttgcgtccggttttcggctccagttccaccaggccgtagcgcgtggtcgggtaacgtccggtcgctaccggcatttctacggtcgccagaccgcgataatgcgtcactgctggctgcgggcctttatcttcgcgggcaaatttatcagcgattttgtccagttcttccaccagtggataatccagcaccgcttcttccatcaaccagccgcgcacaatcgcatggtaacgtttctggatttggtgctgttcaaactgttgtgccagcagccgtccggcctcgctggataatcccatcaacaacacaccagaagtgggtcggtccagacgatgagcagtaaaaacatgctggcctatctggtcacgcacggtttgcatgaccactactttctcgtcgcgatccagccagctgcggtgaaccagccagccggagggtttatttaccgcaaccagccattcatcctgatagagtatttccagcattagctcgcatcatccgcaaaaagagcatccagtttttccagctcagccagaataagcgcgcgttgcggatggtccgtcgccagcgccatttcataatagggtgcaacggcaaaagcgcccggtaacggctgtttgttatctaacaaatcgtgcattcgcgggatcagcacccactgcaaccactccagtggttccatggtgtccataaagaacggttgggtactattaaattgatgcggctggggttcatcgtttcgccagtgctgatgttcacgcagtaacgcttcaagcgcctgcaactggagacgaacgcggtcatgagtggtcataaagcaacctcaataagaaaaactgccgcgaaggatagcaggaataaaaaaagggagcactgtattcacagcgctcccggttcgtttcgcagcattccagctacttttgttgctccctgctcatccttgacaacttttcctctggccttgcggccaatcgttcatcctgaactattgcttcctgctcacaccaccccgatgtgatacttcatcctgaagtgtccctggccttcctgacccaccgaatcatcctgaccggttctcattctccatcctggaggtgtcctttaacgcgtcctgcgtcatcctcttcgcttcatccagaagcctttccctgaaacaccatcctggtgtgtcctgcagaagtgtcatcatcctgatgttcacttcgttgtctgactccctgtcgacgaagatagaatcgtctttttcgcgaagtcttacaaggcgcttacagacaatgccttaaggaaaatttcatatgaaagttaagaattaacaatcaacattttgattttaaatgaaaataacgattcttatctttttaagtattcgcttatttcctggcgatctcctacagagtctgtaagagatctctcacaaccagatggggtatttggattacagaagaggcttaagttgattaaggaattccgcaagattactggctaaatgcgtccgtttacgtgttcccagcgtctctttgcacacttcaccggagagattacacacgctgatgacctctaactcttcttccagcgtcgcgataaatagtgtgggcggcagttttagccttttctgagtcaccagatgaccaatcagattttcctgcacccgacggaagtcgtcttcactccaggtttgcagcaatgtcagtttgatatcgccaaactgcgcgtgcatatccccggcaaactgagtcgtataaaaggtatgaattgtgggttgtatcacaatatcaaaagcgcgttcaaccgcgtttacattttgttccccggtaaacggctggggttgccagtatacggcatcttcggtagtactaataatgcacggactaggaacaccgtacagttcctcacttaacggccagcttttatgctcttcatgccacgcatcgcagtagcgtgcagtaaaatctttcagggcttgtgcggtcaaatcgtccactaatttctctcttcacttaaaccagatacacttgtcgtttagtttatctggtttatgacggtgaaacatgtcttcttatgcaaaccatcaggcacttgcgggcctgactcttggaaaaagtaccgattaccgggatacctatgacgccagcctactgcaaggcgttccacgcagcctgaatcgcgacccgctgggtctgaaagcggataacctgccttttcacggtacggatatctggacgctgtatgaactttcctggctgaatgcgaaaggtttgccgcaggtcgctgtcggtcatgttgaacttgattacaccagcgtaaatctgattgagagcaagagttttaagctctatctcaacagttttaaccagacgcgttttaataactgggatgaggtgcgccagacgctggagcgcgacttaagcacttgcgctcagggtaagattagcgtggcgttatatcgtcttgatgaactggaaggccagccgataggtcattttaatggcacttgcattgatgaccaggatatcactatcgataactatgaattcactactgactatctggagaatgccacctgtggtgaaaaagtagtggaagagacgcttgtcagccacctgctgaaaagtaactgcctgatcacccatcaaccagattggggtagcctccaaattcagtatcgtggacgccaaattgacagagaaaaactgctgcgttacctggtcagtttccgtcatcacaacgagttccacgaacagtgcgtggaacgcatctttaatgacctgttacgcttctgccagccagaaaaattgagcgtttacgcacgttatacccgtcgtggcggtctggacattaacccgtggcgcagtaatagcgattttgtcccaagcaccacaagactggttcggcaataaatttttctcaattttgcgtgctggattcacgcagaaggttgtgaaaggtcatcaggcagggctattgtaatcaaagggaatgacgatattcgtcccataaggagtttttcttgattacacatattagcccgcttggctccatggatatgttgagccagctggaagtggatatgcttaaacgcaccgccagcagcgacctctatcaactgtttcgcaactgtagtcttgccgtactgaactccggtagtttgaccgataacagcaaagaattgctgtctcgttttgaaaatttcgatattaacgtcttgcgccgtgaacgcggcgtaaagctggaactgattaatcccccggaagaggcttttgtcgatgggcgaattattcgcgctttgcaggccaacttgttcgcggtcctgcgtgacattctcttcgtttacgggcaaatccataacaccgttcgttttcccaacctgaatctcgacaactccgtccacatcactaacctggtcttttccatcttgcgtaacgctcgcgcgctgcatgtgggtgaagcgccaaatatggtggtctgctggggcggtcacagtattaacgaaaacgagtatttgtatgcccgtcgcgtcggaaaccagctgggcctgcgtgagctgaatatctgcaccggctgtggtccgggagcgatggaagcgccgatgaaaggtgctgcggtcggacacgcgcagcagcgttacaaagacagtcgttttattggtatgacagagccgagcattatcgccgctgaaccgcctaacccgctggtcaacgaattgatcatcatgccagatatcgaaaaacgtctggaagcgtttgtccgtatcgctcacggtatcattatcttccctggcggtgtgggtacggcagaagagttgctctatttgctgggaattttaatgaacccggccaacaaagatcaggttttaccattgatcctcaccggcccgaaagagagcgccgactacttccgcgtactggacgagtttgtcgtgcatacgctgggtgaaaacgcgcgccgccattaccgcatcatcattgatgacgccgctgaagtcgctcgtcagatgaaaaaaagcatgccgctggtgaaagaaaatcgccgtgatacaggcgatgcctacagctttaactggagtatgcgcattgcgccagatttgcaaatgccgtttgagccgtctcacgagaatatggctaatctgaagctttacccggatcaacctgttgaagtgctggctgccgacctgcgccgtgcgttctccggtattgtggcgggtaacgtaaaagaagtcggtattcgcgccattgaagagtttggtccttacaaaatcaacggcgataaagagattatgcgtcgtatggacgacctgctacagggttttgttgcccagcatcgtatgaagttgccaggcagtgcctacatcccttgctacgaaatctgcacgtaatctccgctcccccggtgacgtttgttgccgggttttctcgtttttggtcacttactcatcaactcatttcatttgttatatgaatgtttctcaccaccctcacgcgacaaatatcatcacagttaatatgtcatacaatttatgttgcaacgcaaacgtttccctattttcataaaccgtattttatcgctatgaaaaagaaattatcgccatgattaactaaaagtattgattttttcagttcaacctacatatattgcgcgccccggaagaagtcagatgtcgtttaatgggcaaatattgcccttaaattctcttttacttttgatttacagagtaaagcgttgggataatctatcttccaagtagattattgtatttgagatcaagatcactgatagatacataacttgtgtgtatctttccgccctcaaattattacggcggtaaatgattaagccatcgccgatagacagatttcatttttacggtcaggcaccttcccgggctgaactggctaaaagctgaattatttgcattcctccaggagaaatagatggaaacgactcaaaccagcacgattgcgagcaaagactctcgtagtgcctggcgcaagacagacaccatgtggatgctgggcctttacggcacggcaatcggcgcgggcgtgctgttcctgccaatcaacgccggtgttggcggtatgatcccgctgatcatcatggctatccttgcgttcccgatgacgttttttgctcaccgcggcctgactcgcttcgtactgtctggtaaaaacccgggcgaagacatcaccgaggttgtagaagaacactttggtattggcgcaggtaaactgattaccctgctctacttcttcgctatctacccgatcctgctggtttatagcgtggcaatcaccaataccgttgaaagcttcatgtctcaccagctgggtatgacgccaccgccgcgtgcgattctgagcctgatcctgatcgtgggtatgatgaccatcgttcgcttcggtgagcagatgatcgttaaagcgatgagtattctggtattcccgtttgttggcgtactgatgctgctggctctgtacctgatcccgcagtggaacggcgctgcactggaaacgctgtctctggacactgcatctgcaaccggaaacggtctgtggatgaccctgtggctggcaattccggtaatggtgttcagcttcaaccactctccgatcatctcttctttcgccgttgcgaagcgtgaagagtacggcgatatggcagaacagaaatgcagcaagatcctggcattcgcacacatcatgatggtgctgaccgtaatgttcttcgtcttcagctgtgtactgagcctgactccggcagacctggctgcggctaaagagcagaacatcagcattctgtcttacctggctaaccactttaacgcaccggttatcgcgtggatggctccgattatcgcgattatcgctatcaccaaatccttcctcggtcactacctgggcgcacgtgaaggcttcaacggtatggtgattaaatctctgcgtggtaaaggtaagtctatcgaaatcaacaagctgaaccgtatcactgcgctgttcatgctggtaacgacctggattgttgccaccctgaacccgagcatcctgggtatgattgaaaccctgggcggtccaatcatcgcgatgatcctgttcctgatgccgatgtacgcaattcagaaagtaccggcaatgcgtaagtacagcggtcacatcagcaacgtattcgttgtcgtgatgggtctgattgcaatctccgcaatcttctactctctgttcagctaagtcctttcgcgccgctttcgggcggcgcttcctccgttttaacgcgatgtatttcctatgattagcgtattcgatattttcaaaatcggcattggcccttccagttctcataccgttggaccaatgaaagcgggtaaacaatttaccgacgatctgattgcccgtaacctgcttaaagacgtgacccgcgtggtggttgacgtgtacggcagcctctctctgaccggtaaaggccaccacactgatatcgccattattatgggcctggcgggtaacctgccggataccgtggatatcgattccatccccagttttattcaggatgtgaatactcatggtcgcctgatgctggcaaacggtcagcatgaagtggagttcccggttgatcagtgcatgaacttccacgccgacaacctttctctgcatgaaaacggtatgcgcattaccgcgctggcgggcgataaagtcgtttacagccagacttactactctattggcggtggctttatcgttgatgaagagcattttggccagcaggatagcgcaccggttgaagttccttatccgtacagtagtgcagccgatctgcaaaaacattgtcaggaaaccgggctgagtctctctggcctgatgatgaaaaacgagctggcgctgcacagcaaagaagagctggaacagcacctggcgaacgtctgggaagtcatgcgcggcggtattgagcgcggtatttccaccgaaggcgtgttgcctggcaaactgcgcgttccacgccgtgctgcggcactacgccggatgctggtcagccaggataaaaccaccactgacccgatggcggttgttgactggatcaacatgtttgcactggcagtgaacgaagagaacgctgctggcggtcgcgtggtgactgcgccgactaacggtgcgtgcgggattatcccggcagttctggcgtactacgacaagtttatccgcgaagtgaacgctaacagtctggctcgttacctgctggtagccagcgccattggttctctttataagatgaacgcgagcatttctggtgctgaagtgggttgccagggtgaagttggcgtggcgtgcagtatggcggcggctggtctggcagaactattaggcgcaagcccggcgcaggtgtgcatcgcggcggaaatcgccatggagcacaacctcggtctgacgtgtgacccggtcgccggacaggtacaggtgccatgcatcgagcgtaacgccattgcggcagtaaaagcggtgaacgccgcacgtatggcgctgcgccgtaccagcgagccgcgcgtctgcctcgataaagttatcgaaaccatgtacgaaacaggtaaagatatgaacgccaagtaccgcgaaacctctcgcggcggcctggcaatgaagatcgttgcctgcgattaatcgctctccaaaggcctcgttttgcgaggcctcttcccgatttctcatccagccgtagcctgttccggcatcgaatgttacccttatcgcctgatctttaagggggttatcgtggctgttcatttgcttattgtcgatgcactgaatcttattcgtcgcattcatgccgttcaggggagcccctgtgtcgaaacctgccagcatgcgctcgatcagctcattatgcacagccagccaacccacgcggtcgccgtttttgatgatgaaaaccgcagtagcggctggcgtcatcagcgtttaccagattacaaagcgggtcgaccgccaatgccggaagagttgcacgacgagatgcctgcattacgcgccgcctttgagcaacgcggcgtcccgtgctggagtaccagcggcaacgaagccgatgacttagccgccacgctggcggtcaaagtgacacaggccgggcatcaggcaacgattgttagcacagataaaggctactgtcagttacttagtccgacattacgtattcgtgattacttccagaaacgttggctggatgcgccatttatcgataaagaatttggcgttcaaccgcagcagttgcccgattactggggacttgcggggatcagcagtagtaaggtaccgggtgttgcgggaatcggaccaaaaagcgccacgcagctgctggtcgagtttcagagtctggaagggatatatgagaatctggatgcggttgccgaaaagtggcgcaaaaaattagaaacccataaagagatggcgtttctgtgccgcgatattgcccgcttacaaaccgatttgcatatcgacggcaatttacagcaattgcggttggtacggtaacggcgagccggatacgccgcaaacgtcgtatccggcattatcacatcagcgcatttaccaggcggtatggtaaagctctacaatatcctcaagcgttgcttcacgcgggttgccaccggtacaaacatcatccagtgccgcctgcgccagtgccggaatgtcttccttgcgtacaccaacatcacgcaaatgtggcggaataccgacatcacggttgagagcaaacaccgcttcaacagcggcattacgcgcctcttccaggctcataccttccactttcacgcccataacgcgcgcgatatcgcggtacttctcaccggtaaagtcagcgttataacgcatgacatgcggtaacaggatggcgttcgcaacaccgtgtggagtgttataaaacgcgcccagtggatgcgccataccatgcaccaaccctaacccaacattgctgaagcccatacccgcaacatactgcccgagcgccatttcttctccggcatccttatcaccagcaacgcttcctcgcagcgccccagcaatgatttcaatcgctttaatgtgcagtgcatcggttagcgcccacgcgccacgggtaatatacccctcaatagcatgagtgagcgcatcgacacccgtcgcagctttcagcgctggaggcataccatccatcatgtcagcgtcaataaacgccacctgcgggatatcatgcggatcaacgcaaacaaacttgcgccgtttctcttcgtcagtgatcacgtagttaatggtcacttctgccgcagtacctgctgtggtaggaattgccagaatcggtacactgggtttattggtcggggaaagcccttccaggctacgcacatcggcaaactccgggttgttgctgataatgccaatcgctttacaagtatcctgtggagaaccaccaccaatagcgatcaggtaatccgcgccgctattctggaatacaccgagcccttctttgacgacagtaattgttgggttgggcactacgccgtcgtaaatcgcccatgccagccctgcagcatccatcttatcggtcactttcgccaccacgccgcattgcaccagcgttttatcggtgacgatcagcgccttctgataaccacggcgtttcacctcatcggttaaagccccaacagcaccccgaccaaaccatgccgtttcgttcagaatcattctgttagccatcatccttctccttgttgctttacgaaattactcttcaattcgtaacccataggttttgaatttctccagcactacggcaatctcttcatcgctcagcactggcaccgggtccgtaatcgccagggtcgtcaggtaaagttgcgccagcacttcaacttcatgcgccagccataacgctttttccagattcacctcacaagcgataagcccatgatgttgtaacaaagttgccttacgatttttgagagccagcgcaacatgttcagaaagttcgcgtgttccaaaggtcgcataaggcgcgcaaggaatagaattaccgccagccgccgcaatcatgtagtgaatagcggggatgcttcggttaagaatggaaactgccgtgcaatgaacggcatgattgtgaacaaccgcgttggcatccggtctgctttgataggctgccatatggaaacgccattcgctactggggagctttccttcctcatgtttaccgttgccatcaataaagacaatatggctctccgtcagtttttcatatggaatgcctgtaggcgtaatcagcatcccatcctgataacgtacactgacgttccccgctgtcccctggttcagtcccaggcgggtcatttccaggcaagtgtcaataatctgacgagcaagtttatttcgttccattagctacctctctctgattcaaaacagggcaataatgttgttcctttcacactattgaattagccgtttaattacccaccatcttcttcctgattaacaagaaagaaattcacaagcttatattttgtgacctggttcaactaatcacagtaaataactgcaagttctctttttataaccccattaaaaatgaccgctcttaaaaatatttatcaaaacggtcatttttctattcctccaagcccggaatgaccgttttcggcacaaacaattaatacggtcatctgatttgtgttttttatgatttattttctgaaacgggcatgaaatttcgattattaaagtgatggtagtcacataaagtcaccttctagctaataagtgtgaccgccgtcatattacagagcgttttttatttgaaaatgaatccatgagttcatttcagacaggcaaatattcactgatatgaagcccgaactcgctggttttgcacttttgaaaacataaccgattacgtgcttaagcttctgaacctaagaggatgctatgggaaacacaagtatacaaacgcagagttaccgtgcggtagataaagatgcagggcaaagcagaagttacattattccattcgcgctgctgtgcagtctgttttttctttgggcggtagccaataaccttaacgacattttattacctcaattccagcaggcttttacgctgacaaatttccaggctggcctgatccaaagcgccttttactttggttatttcattatcccaatccctgctgggatattgatgaaaaaactcagttataaagcagggattattaccgggttatttttatatgccttgggtgctgcattattctggcccgccgcagaaataatgaactacaccttgtttttagttggcctatttattattgcagccggattaggttgtctggaaactgccgcaaacccttttgttacggtattagggccggaaagtagtggtcacttccgcttaaatcttgcgcaaacatttaacagctttggcgcaattatcgcggttgtctttgggcaaagtcttattttgtctaacgtgccacatcaaagccaagacattctcgataaaatgtctccagagcaattgagtgcgtataaacacagcctggtattaagcgtacagacaccttatatgatcatcgtggctatcgtgttactggtcgccctgctgatcatgctgacgaaattcccggcattgcagagtgataatcacagtgacgccaaacaaggaagcttctccgcaagcctttctcgcctggcgcgtattcgccactggcgctgggcggtattagcgcaattctgctatgtcggcgcacaaacggcctgctggagctatttgattcgctacgctgtagaagaaattccaggtatgactgcaggctttgccgctaactatttaaccggaaccatggtgtgcttctttattggtcgtttcaccggtacctggctcatcagtcgcttcgcaccacacaaagtcctggccgcctacgcattaatcgctatggcactgtgcctgatcagtgccttcgctggcggtcatgtgggcttaatagccctgactttatgcagcgcctttatgagcattcagtacccaacaatcttcagcctgggcattaagaatctcggccaggacaccaaatatggtagctccttcatcgttatgaccattattggcggcggtattgtcactccggtcatgggttttgtcagtgacgcggcgggcaacatccccactgctgaactgatccccgcactctgcttcgcggtcatctttatctttgcccgtttccgttctcaaacggcaactaactgaacatattttccgaataaagtgaggaatctgtaatgaaaaaaatcagcttaccgaaaattggtatccgcccggttattgacggtcgtcgcatgggtgttcgtgagagccttgaagaacaaacaatgaatatggcgaaagctacggccgcactgctgaccgagaaactgcgccatgcctgcggagctgccgtcgagtgtgtcatttccgatacctgtatcgcgggtatggctgaagccgctgcttgcgaagaaaaattcagcagtcagaatgtaggcctcaccattacggtaacgccttgctggtgctatggcagtgaaaccatcgacatggatccaacccgcccgaaggccatttggggctttaacggcactgaacgccccggcgctgtttacctggcagcggctctggcagctcacagccagaaaggcatcccagcattctccatttacggtcatgacgttcaggatgccgatgacacaagcattcctgccgatgttgaagaaaaactgctgcgctttgcccgcgccggtttggccgtcgccagcatgaaaggtaaaagctatctgagcctgggcggcgttagcatgggtatcgccggttccattgttgatcacaacttctttgaatcctggctgggaatgaaagtccaggcggtggatatgaccgaactgcgtcgccgtatcgatcagaagatttacgacgaagccgaattggaaatggcactggcctgggctgataaaaacttccgctatggcgaagatgaaaataacaaacagtatcaacgtaatgccgagcaaagccgcgcagttctgcgcgaaagtttactgatggcgatgtgtatccgcgacatgatgcaaggcaacagcaaactggccgatattggtcgcgtggaagaaagtcttggctacaacgccatcgctgcgggcttccaggggcaacgtcactggaccgatcaatatcccaatggtgacaccgccgaagcgatcctcaacagtagttttgactggaatggcgtgcgcgaaccctttgtcgtggcgaccgaaaacgacagtcttaacggcgtggcaatgctaatgggtcaccagctcaccggcaccgctcaggtatttgccgatgtgcgtacctactggagtccagaagcaattgagcgtgtaacggggcataaactggatggactggcagaacacggcatcatccatttgatcaactccggttctgctgcgctggacggttcctgtaaacaacgcgacagcgaaggtaacccgacgatgaagccacactgggaaatctctcagcaagaggctgacgcttgcctcgccgctaccgaatggtgcccggcgatccacgaatacttccgtggcggcggttactcttcccgcttccttaccgaaggcggcgtcccgttcaccatgactcgtgtcaacatcatcaaaggcctgggaccggtactgcaaatcgcggaaggctggagcgtggaattgccgaaggatgtgcatgacatcctcaacaaacgcaccaacagtacctggccaaccacctggtttgcaccgcgcctcaccggtaaagggccgtttacggatgtgtacagcgtaatggcgaactggggcgctaaccatggggttctgaccatcggccacgttggcgcagactttatcactctcgcctccatgctgcgtatcccggtatgtatgcacaacgttgaagagaccaaagtgtatcgtccttctgcctgggctgcgcacggcatggatattgaaggccaggattaccgcgcttgccagaactacggtccgttgtacaagcgttaatacattactccctgatgtgatgcccggtcgctccggctaccgggcctgaacaagcaagagtggttagccggataagcaatgttatccggctatattgcaggagcgattatgaaacaagaagttatcctggtactcgactgtggcgcgaccaatgtcagggccatcgcggttaatcggcagggcaaaattgttgcccgcgccagtacgcctaatgccagcgatatcgcgatggaaaacaacacctggcaccagtggtctttagacgccattttgcaacgctttgctgattgctgtcggcaaatcaatagtgaactgactgaatgccacatccgcggtatcgccgtcaccacctttggtgtggatggcgctctggtagataagcaaggcaatctgctctatccgattattagctggaaatgtccgcgaacagcagcggttatggacaatattgaacggttaatctccgcacagcggttgcaggctatttctggcgtcggagcctttagtttcaatacgttatataagttggtgtggttgaaagaaaatcatccacaactgctggaacgcgcgcacgcctggctctttattagcagcctgattaaccaccgtttaaccggcgaattcactactgatatcacgatggccggaaccagccagatgctggatatccagcaacgcgatttcagtccgcaaattttacaagccaccggtattccacgccgactcttccctcgtctggtggaagcgggtgaacagattggtacgctacagaacagcgccgcagcaatgctcggcttacccgttggcataccggtgatttccgcaggtcacgatacccagttcgccctttttggcgctggtgctgaacaaaatgaacccgtgctctcttccggtacatgggaaattttaatggttcgcagcgcccaggttgatactagcctgttaagtcagtacgccggttccacctgcgaactggatagccaggcagggttgtataacccaggtatgcaatggctggcatccggcgtgctggaatgggtgagaaaactgttctggacggctgaaacaccctggcaaatgttgattgaagaagctcgtctgatcgcgcctggcgcggatggcgtaaaaatgcagtgtgatttattgagctgtcagaacgctggctggcaaggagtgacgcttaataccacgcgggggcatttctatcgcgcggcgctggaagggttaactgcgcaattacagcgcaatctacagatgctggaaaaaatcgggcactttaaggcctctgaattattgttagtcggtggaggaagtcgcaacacattgtggaatcagattaaagccaatatgcttgatattccggtaaaagttctcgacgacgccgaaacgaccgtcgcaggagctgcgctgttcggttggtatggcgtaggggaatttaacagcccggaagaagcccgcgcacagattcattatcagtaccgttatttctacccgcaaactgaacctgaatttatagaggaagtgtgaaatgctgaaaacaattagcccgttaatttctcccgaactattgaaagtgctggcagagatgggacatggagatgaaattattttttccgatgctcactttcccgcccatagcatgggaccgcaggtgatccgcgctgatggcctgttggtgagcgacttgctccaggcgattatcccgttatttgaactggacagttatgcaccgccgctggtgatgatggcggcggtagaaggtgacactctcgatcctgaagtagaacgacgttaccgtaatgcgcttagtctacaagccccgtgtcctgacatcatccgcatcaatcgttttgcgttttatgaacgggcgcaaaaagcctttgcgatcgttatcacaggcgaacgagcgaagtacgggaatattcttttaaaaaaaggggtaacaccgtaatctcataccggtacgcccgcatgacgcgggcggttatcgaatgatggggtgaaaaatatgaaagcggcacgccagcaagcgatagtcgacctgctgctgaaccataccagcctgaccacggaagctctctctgaacagctaaaggtcagtaaagaaaccattcgtcgcgatctcaatgaattacagacgcagggtaaaattctgcgcaatcatggacgcgctaaatatatccaccgtcaaaatcaagacagtggcgatccctttcacatcaggctgaaaagccattatgcgcataaagcagatatcgcgcgcgaggcgctcgcgtggattgaagaagggatggtgatagccttagacgccagtagtacttgctggtatctggcacgccagttgcctgacatcaacattcaggtcttcaccaatagccatccgatttgccatgaactcggtaaacgcgaacgcattcaactgatcagttccggcggcacacttgagcgcaaatatggctgttacgtcaatcccagcctgatttcccaacttaaaagcctggaaatcgatctgtttattttttcttgtgaagggatcgatagcagcggcgcactgtgggactccaatgcgatcaacgctgattacaaaagcatgctattaaaacgtgccgcgcaaagcttgttattgattgataaaagtaaatttaatcgtagtggggaagcccgcatcgggcatctggatgaggtaacgcacattatttctgatgagcgccaggttgcaacttctttggtaacagcctgacggaaagggtagcaggccggagacgacgccccggccttgcctgttatcgctcgtcgcgacgaccacccaccgcagcccagatgcggcggacgtgcaccgtcacttcttcgcgatcgtgatacaactgccgcgcctgaatctgagcatttatgccatgttcatcaagctgtgcctgaatatacgccagattgtgactcacttcttcgtagcgttttttcatcggcagtttgaggttgaaaatggtttcacggcaccagccattaaccagccactgtgccatcaatgccgcaactttcgccggtttttcaaccatatcgcataccatccaggagatattgctgcgcgtcggacggaatttgaaaccgtcttcccgcagccacgtcacctgtccggtatccatcagactttgcgccatcgggccgttgtcgacggaataaacccacatgttgcgcttcaccagttggtaggtccagccgccagggcaagcgcctaaatccaccgcccacatcccgttcgccaggcgttcatcccactcatccgcaggaataaacacatgaaatgcctcttccagtttgagcgtggaacgactcggcgcatctgccggaaatttcaggcgcggaatgcccatatagaacgggctattattgttgctgtaactgtaaccggtatagcagcagcctggtgcaataaagaatacatgcacaaccggacgcttcggcgtttcatagttcgccagcaccccggcatcgcgcaaggcagcgcgtagcggaacagtaaatttacggcagaatttcagtaactctttgctttcgttggtatcggcaacttcaacacgcagttcaccgcccttctctactacgccctgtaacatgccgacaatgggggtaatacgatcttctggcggcaaatgctgcaggagttcccccaccacaaaccactggcgggcaaaaattaaactactgaacggcagctcacggattaacttatcgccatcatcaggttgataacattcataaatgacataacccgcattctctttcacgcgggcaaaaccgaaaatttcccgctggccggctttatcggtaatttctgcggcgcactctttttcaaagcccggacggcacagcaatacaaccttattcatgacttacgcccttgcgctttaaacggatagcaccaactaacattaacgcccagcccgcgaggaagctcacgccgccaaccggagtgacaaacgcccacaaacgcagatgggacagcgccaggcaataaaggctgccgctgaacaacaccgtgcctaacgcgaggaaaacgctactccagtaaaaccagatactgatgcgacgctgcattgccaccgccagacctaagatcgccagcgtatgaaacgcctggtattcgaggccggtctggatccagcccatctcaacggcccccatggttttacttaacacatgcgcgccaaaagcgcccagagccacaaaaatgaagccgctaatggcggcgaaaatcagcataaaacggctggtcatggtcgtaccctacgtaaattattgttcataacgaaagcggaatttttcttgttcagcagcggctttcgccaggatccattggcgaaaggcggctattttacccagttctgcctgactgtcatgacaaaccagataaaaagcatttttactgaccagaacatcattaaacgggcaaacaagacgtccggcctcgatttcagattgcgccatcacgttatttgccagcgccactccctgcccgtggatagccgcttgcagcaccatggcgctatggctaaaaattggcccttgctgaacgttgatatgatttaaccccaactgtcgggtatatgtctgccagtcacggcggctagcatcatgtaataacgtatgtttagccagatcttccggtgtcttcaagggtttttcgccagtcagcagtagcgggctacacaccggcaataaatattcggcgtacagtttttccacccgtagccccggccagttgccccgaccataaaatatcgccacatcaacatcatccgccagcttatcttcctgacgatcaaccgcctggattcgaacgtcaattcccggataagcactattaaagctggaaagtcgcggaaccaaccaatgaatggcgaaactggggagtaaactgaccgtcaacgcccccttggcgctacgggcctggagtttacgcgtcgcttcggttaattggctaaatatctctttgatatcgaggaaatagctttgcccttcctcggtcagcaggagactacgattacggcggcggaacagttttagccccaaaaaatcctcaagagacttgatttgatgacttactgcggcttgggtcacaaaaagctcttctgctgcgcgagtgaaacttaaatggcgtgctgcggcatcaaaaactcgtaaggcatttagcggtggtaatcgtttagacatggctattaaactttgatgttaaatgaatttaacaattagatcacactatgtaacctattagtttttttaatctgagccattataaattgtccgttgagcttctaccagcaaatacctatagtggcggcacttcctgagccggaacgaaaagttttatcggaatgcgtgttctggtgaacttttggcttacggttgtgatgttgtgttgttgtgtttgcaattggtctgcgattcagaccatggtagcaaagctaccttttttcacttcctgtacatttaccctgtctgtccatagtgattaatgtagcaccgcctaattgcggtgcttttttttaccttgcgatcgcgaattactgatccagttcgaccatctctttcacgtcagtacggttgatctgctgtttgttgccattagcgtctttatagctaatcataccggtatcgttatcagtctgtggtttgccgtcagagacgatggtacgtccgtcattggtgtgcatcacatagttgctaccggaacaggcgctcagggcaaaagtcagcatacaggcagaaataattgcggcagtctttttcatcatcttctccttaaagcgattaataaatcttaatagtattgattaacaggctaaaattaacgcctaacactattcagcatatgttacttacgcggcttcgccaggatatccagataattctgatggttagcactctccttgtatcaaagtgaattttgcgtcacgatcggtgcatcaagccgaggagtaccatgaacgtttttaatcccgcgcagtttcgcgcccagtttcccgcactacaggatgcgggcgtctatctcgacagcgccgcgaccgcgcttaaacctgaagccgtggttgaagccacccaacagttttacagtctgagcgccggaaacgtccatcgcagccagtttgccgaagcccaacgcctgaccgcgcgttatgaagctgcacgagagaaagtggcgcaattactgaatgcaccggatgataaaactatcgtctggacgcgcggcaccactgaatccatcaacatggtggcacaatgctatgcgcgtccgcgtctgcaaccgggcgatgagattattgtcagcgtggcagaacaccacgccaacctcgtcccctggctgatggtcgcccaacaaactggagccaaagtggtgaaattgccgcttaatgcgcagcgactgccggatgtcgatttgttgccagaactgattactccccgtagtcggattctggcgttgggtcagatgagcaacgttactggcggttgcccggatctggcgcgagcgattacctttgctcatagtgccgggatggtggtgatggttgatggtgctcagggggcagtgcatttccccgcggatgttcagcaactggatattgatttctatgcttttagtggtcacaaactgtatggcccgacaggtatcggcgtgctgtatggtaaaagtgaactgctggaggcgatgagcccctggctgggcggcggcaaaatggttcacgaagtgagttttgacggcttcacgactcaatctgcgccgtggaaactggaagctggaacgccaaatgtcgctggtgtcataggattaagcgcggcgctggaatggctggcagattacgatatcaaccaggccgaaagctggagccgtagcttagcaacgctggcggaagatgcgctggcgaaacgtcccggctttcgtagtttccgctgccaggattccagcctgctggcctttgattttgctggcgttcatcatagcgatatggtgacgctgctggcggagtacggtattgccctgcgggccgggcagcattgcgctcagccgctactggcagaattaggcgtaaccggcacactgcgcgcctcttttgcgccatataatacaaagagtgatgtggatgcgctggtgaatgccgttgaccgcgcgctggaattattggtggattaatgacaaacccgcaattcgccggacatccgttcggcacaaccgtaaccgcagaaacgttacgcaataccttcgcaccgttgacgcaatgggaagataaatatcgccagttgatcatgctggggaaacagcttccggcattgccagacgagttaaaagcgcaggctaaagagattgccggatgcgaaaaccgcgtctggctgggatatacagtggctgaaaacggcaaaatgcatttctttggcgacagcgaagggcgcattgtgcgcggcctgctggcggtgttgttgactgccgttgaggggaaaaccgccgccgagttgcaggcacagagtccactggcattgtttgatgagctgggattacgtgcgcagcttagcgccagtcgcagccaggggttaaatgcgttaagcgaggcgattatcgctgcgacgaagcaggtttaagcacagaaccgggtcggataagacgttcgcgtctcatccgacctgattgtttaaccctgacgcgccgctttcgccatcatcttcttcagcgcatgagaaaccgcaacaaacccaaaggtggcggtcaccatcgttgccgcgccaaatccagatgcacaatccatccgcttcggcccttctgccgtggctttcatcgcacacaccgtaccgtcactctgcgggtacaccagcgcttcagtagaaaacacgcaatccacgccgagcttacctttactgtttttcactacgccaaaatcgcttttcaggcgctcgcgcaacttcgccgccagcgggtcctgaatcgttttcgccagatcggtaacctgaatctgcgtcggatcaatctgcccacccgcgccaccggttgtgaccagtgggattttattgcgccgacaataagcaatcagcgccgctttgggccgtacactatcaatggcatcaatcacgtagctataacccacgctcatatactgcgctacgttatccggcgtcacgaaatcatccaccaccgttacacggcactccgggttaatctggcgaatacgctccgccataacttccgcttttgccagcccaacgttatcgcgcagggcatgaatttgccgattggtattggtgacgcacacatcatccatatcgataagcgtgattgcgccaatccccgtgcgcgccagcgcttccgccgcccaggaaccgacaccaccgataccaaccacacaaatatgcgcgtcagcaaacagttgcaacgctttttcaccatacagacgcgctgtgccaccaaaacgctgacgccatgcatcactaattaccacagacatagcacctcagaattaaaaagggcgaggttatccctcaccctaaacgcataaatgcctgatgcgctacgcttatcaggcctacataactcctgcaatattttggatttgcatgatttgtaggccggataaggcgttcacgccgcatccggcatgaacaacgcgcacttagtcaataatcaggatgtgaggttacccctcaccctgtcatatccgtaaaaacggcatacagaatatcacatcagccgctaaagacgttacctgcgcccggggcggttttcagcacccagacacgtccatagtggttgtaccaacctgcgcggtgtccggcttccggcccgatcccttgatagatatcgaagtgttggcctttgattgcaccaccgacatccagcgccaccatcagacgcagttcgtactgaccattaaatttgccgttattatccagcaacggcacttctgccagcaaggtagtacctggcggaataatggaacgatcagaggcaacactcgcgcgaccaaccagcggcaccgcacttgcccctttcaccggagcaaaagattgcggtttaaagaagacgaaagacgggttctgttccagcagctcgcgaacctcggcttcactgtgtgtttcgccccagtgacgaatcgcctgcatgctcatatcttcttttttcacttcgccacggtcgatcagcaccttaccaatgctgcgataggcatgaccgtttttccctgcatagctgaaaaagttaagcggactgccatcaccaaagtcgatatacccactaccctgcacatccataatgaagttatccatcagggagttactgtaagcgagaatatatttatcactcaatgcccccgcgtagatctccgcacgagacggcagacgaccacgttttggcggcatacggtaaataggatactggaactcgccctggcgggtatggcgcgcctgaattaccggcgtgtaataaccggtaaactgcacgttaccatagttgtcggcaccttccatctgccaggcatcaatgccgaactggcgcatattgcgggtatcaccgcctgcgcgcagccactcttgcaccgcgttataaacattactctggttgccatacagacgcggactgctattacggatatggttaatttgctcggcaaaatcaccggcgttaatcggcgcgccaacggcatctggctggttcaccagagagaaaggctgggtaaatttcccgtctttatattgctgtccgcgatcggttggtttggaagagcaggcggcaagcattgccacaaccgtgcccataagaaggtactttacccaacgtcctttcattgttctcttcttcaggttaaaaaataaggcgcaacgaagataacaaaccgccgcgtttaatgaaatgagcagcctctccctgacgcaaattttgcacaaaaaataggctttagtgatttgtttttgttcaaaatcatgccaaatccgtgatcggggtaaaaaaaaggttgcatgaaaacgcgagcggagtatagtgcgcatccacggacgcggggtggagcagcctggtagctcgtcgggctcataacccgaaggtcgtcggttcaaatccggcccccgcaaccaattaaaatttgatgaagtaaagcagtacggtgacgcggggtggagcagcctggtagctcgtcgggctcataacccgaaggtcgtcggttcaaatccggcccccgcaaccaatcaaatttgatgaagtaaaagcagtacggtgacgcggggtggagcagcctggtagctcgtcgggctcataacccgaaggtcgtcggttcaaatccggcccccgcaaccaattattgaacaccctaacgggtgtttttttgtttctggtctcccataaaaaagcgccattcagcgcctttttatcatccccttctcgccagcgtcgccccatcggcaaaatacgctttaatccccgcaagaatagactccgcaacttcctgctggaaagtcgccgttttcagtttacgctcttcctcaacgttactgataaacgccgtttcgaccagaatggagggaatatctggtgcctttagtacggcaaacccggcctgttcaacttgatttttatgcagcttattgattttaccgagcttattcagtaccgctttaccaaacttcaggctgtcggcaatggtcaggctctgtaccatatcgaacatggtgtggtcgacatagcggtcaccgcttttgctcacgccaccaatcaagtcgctggcgttctgggtttgtgccagatattttgccgcagtactggttgcacctttggtactgagcgcaaacacagaggaaccgctcggctgacgactggtaaaggcgtcggcatggatagagacaaacaggtcagcacgctgtttctgggcttttgctacgcgcacttgcaatggaatgaagatgtcttcattgcgcgtcatgtacaccttcatattgccctctttctcgatcagagagcgcaaacggcgagctatttgcaataccacatctttttcgcgcgttttgtatttccccaccgcaccggagtcttcgccaccgtggccagggtcaagcataatgacaatcggacgatcgcgccctgctttacccggttgtggaccactttgcgctggcggcacctgcttttcgaggtcgcctttgttgtaatcctccagcagcgccagcagcgggtcctgcatatcctgtgcattggccggatagaggtccatcaccagacgctctttaaacccggcgaccggcgcaagggcaaacagctgcggttttacgttttgctttaattcaaaaaccatccgtacggtttgcgggtcaaattgcccgacgcgcgcgctcttgatgaacgggtcgtctgcacgaatttgtgccgccatccccttgagtacgctgttcaggtttacatcttcgatatccaccaccacgcgttcagggttactcaacgcgaactgcttatatttcagctgacgattactttccaccgtcacgcgggtgtagctggacgcaggccagacgcgcaccgccacgacctggctgaccgcagccagactgacctgacttacgctcaatagccacatggcacccgcgccttgcagtaaacgacgacggctgattgcagtgttggatccactcatgcctctcccgagcaaaagaaatctaagctgtgtaacaagtaaacgactaatttgaccggaaactttagcgaaagacgcataatctgtcatctaataaacggtaaacattctttttatattcacggcattactgataaaaaagtcgctctcgcataaaatttacacttgcaccctgcgaaaaaacagaataaaaatacactaatttcgaataatcatgcaaagaggtgtgccgtggtaaaggaacgtaaaaccgagttggtcgagggattccgccatagcgttccctatatcaatacccaccggggaaaaacgtttgtcatcatgctcggcggtgaagccattgagcatgagaatttctccagtatcgttaatgatatcgggttgttgcacagcctcggcatccgtctggtggtggtctatggcgcacgtccgcagatcgacgcaaatctggctgcgcatcaccacgaaccgctgtatcacaagaatatacgtgtgaccgacgccaaaacactggaactggtgaagcaggctgcgggaacattgcaactggatattactgctcgcctgagcatgagtctcaataacacgccgctgcagggcgcgcatatcaacgtcgtcagtggcaattttattattgcccagccgctgggcgtcgatgacggcgtggattactgccatagcgggcgtatccggcggattgatgaagacgcgatccatcgtcaactggacagcggtgcaatagtgctaatggggccggtcgctgttagtgtcactggcgagagctttaacctgaccagcgaagagattgccactcaactggccatcaaactgaaagctgaaaagatgattggtttttgctcttcccagggcgtcactaatgacgacggtgatattgtctccgaacttttccctaacgaagcgcaagcgcgggtagaagcccaggaagagaaaggcgattacaactccggtacggtgcgctttttgcgtggcgcagtgaaagcctgccgcagcggcgtgcgtcgctgtcatttaatcagttatcaggaagatggcgcgctgttgcaagagttgttcagtcgcgacggtatcggtacgcagattgtgatggaaagcgccgagcagattcgtcgcgcaacaatcaacgatattggcggtattctggagttgattcgcccactggagcagcaaggtattctggtacgccgttctcgcgagcagctggagatggaaatcgacaaattcaccattattcagcgcgataacacgactattgcctgcgccgcgctctatccgttcccggaagagaagattggggaaatggcctgtgtggcagttcacccggattaccgcagtagtagtaggggtgaagttctgctggaacgcattgccgctcaggcgaagcagagcggcttaagcaaattgtttgtgctgaccacgcgcagtattcactggttccaggaacgtggatttaccccagtggatattgatttactgcccgagagcaaaaagcagttgtacaactaccagcgtaaatccaaagtgttgatggcggatttagggtaagcgatgaaaatcgtcggatgcgacatgcgtaacactcgtacgtcgcatccggcaattacgtttattcccgactactaaacaacgccgccagaccactgcgccgctcagtacgagtggcgattgccgcacttaatatgcgctcatcggcatacaggctcagacggcgacgcgcgcgggtcaccgcggtataaaccagctctcgcgttactaccggcgtgcgttggctcggcaaaatcaacgccgcatggtcgaactcgcttccctggcttttatgtaccgtcatcgcccacgtagtttcgtgctctggcaagcgactcggttgcacagacttaatattgccgtccggcatcgcaaaccagacgcgcgtcccctgcccgcgatccagcgcaataccgatatcgccattaaacaacccaagcgcgctgtcattacgggcaatcatcaccggtcgaccttcgtaccaacgagagtgcggatgacgatgaattttgcgcttctgttgcataaactgctcaattcgctcattcagtccagccacgccaaacggcccttcccgcagggcgcacaaaagctggtactcattgaacgcctgaatgattaaatccggctcggcacgcgcttgcagcagatccagataacgtccgtaacccgcaagagcttcctcaagcatcgcaatataatcttcgccgctctgtaaaagccgtttttcgatatcagtaaaatcctgctgaaaaacggttttcactgccgttttatcaccacggttgatcgccgcagctaactgaccaatgccagaatcgctgccgaaacgatagcttttttgcagcaggcagagactgtcgcgcaaagatgccgcttctgtgccggttcctgccggaacgtgagtccccgtcaggcggcttagctgcctggcacgctcggcggtaaagcccgcgttggcataagcgcagatatcgcccagcacagccccagcctcaacgctggccagttgatcacgatcgccgagaaagatcactcgcgcatgatcgggcaaggcgtcgatcagtctgctcatcataggcagatcgatcatactcgcttcatctaccaccagcacatcaagatgcagcgggttaccggcatgatgacgtaaacgctggctacccggctgcgcgcccagcaatcggtgcaaagtgctggtatcttccggaatgcgtttcttttgttcatcggtcagcggtaactgtcgcaaagccttgccgagagattcggttaagcgcgcggcagctttacccgttggtgcagccagacggatacggcagcgttcgccgtcggccatttgaattaacgctgccagcaacttcgctacggtggtcgttttaccggtgccagggccgccggaaatcacgctgatccgccgcgtcagcgccactgccgccgcaactttttgccagttaatttcatcgcttactggaaaaagtttgtccagggtttgcgccagtagagcttcatcaacctcaatggcatgattcacttcgttgaaaaagcgtgccactgtgcgctcgttacaccacatgcgattcaaataaagacgatcgccacagaggatcatcggcgtgggttcatctcccctgctgaccgcttgagaagccagcaagcattcttcccaattttgtagctcaccgatttcactgacacaggtcgccaacagcggatggctcgcctcgttattttccagtcgactaagcggcaaacaaacgtgtccctctccggcatcatgacttaacagtgccgccgcgagggtgacggcaggatgttcatctcccgccacggtcagggcaaattgcacatccagcgggcgtagctgtttgtgctccacagcttccagtaattgcttttgcaatttcattacgcctcctccagggtcataccggcaaacatctcatccatcagggcaatcaacccggcgttgggtcgggttgtgtaaatcccctgttgcggatgttctttatcaacgccacgcaggaacagataaataacgccgccaaagtggtgctcatagtcgtaatcagcaatgcgatggcgcagataacgatgcagcgccagggtataaagctgatattgcagatcatagcggtgtgcctgcattgccgctgccatagcctgttgggtgtaagcgctactgtcttcacccaaccagttggatttatagtcgagcaggtaataacgcccttcgtggcggaacaccaggtcgataaagccttttaacatgccacgtacctgcatgaactccagcggcgggcagcctgcggatagcgggtcaaactggcggattaacgtatcaagctgactggcgataagcggttcactaatcggcagataaaactccatctccacctgtttattgcgggcggaaagttgactcaggcttacgccggtttcattgagaggtgcctggaggacagccgtgatccactcggtcaataccggttcccactggctttcaaagccgccgagttccagtttttcccgcacccagttcgggtcaaccggctgggtaaaatccaggtcttcaaacaaactgtgcaagaacgtccccggactcgcaccgcgcggaaactgatgtggtgttaacgtcggttcttcaacgacgctggcaacgcctgcagcatcgacatccagccgaggcatcaaatcctgggcgataccgtgaccacgctgttgcaaaccagagtagctggtgacgcgccagttatcgccgggcaatcgttgtaacgtcttcgcattcagctctgctgtagaaacatcattaacctgccagggttggttatcaccagtttgtgccgtttgccaggcaatatcatcatcgcataacgcttcaatacaggtgcgaagccctgccgcatcttgcggttcccctttttgcagcaaacgcccgagcgcactttggtggacgtcggtgtcaccttttttatcgccacgacggcgcaccagcggtgcaacgccgagactgcaatgccaaacgctacgtgtcagcgccacgtaaagcaaacgcagatcttccgccagacgttcggcctccgcgaggtcgacgctttctggcgcagcattaagatccagaactgcctcaaagctgtggcgatcgtgataaaacgcctgctcctggacgcggaaattggtgataaacggcagccagaccaatggatattccagccctttgcttttgtggatcgtgacaatctgcaccagatgtttatcactttcgagacgcatttgttggctggaggcattactgtctggctcgaggatatgttggcttaaccagcgtaccagcgcatgttcactttccagctgcgttccggcttcttgtagcagttcgctgatatgcaagatatcggtaagacgccgctcaccgcctgccgttgccagcaagttttcagcaatgttacgcgcgctcatcagcgcccgcagcatcggcataacgccacgtttgcgccagatttgccgataaccatcgaactcttcgactaccacatcccacgcatgttcgtcattgttcagcgtttcgatatccagcgcgttcagccccatcatactcgttgccagcgcactacgcagggtgttctcacgttcgggcgtcatcaccgcctgcaacaaccaaagcatttcctgcgcttccagagtttcaaaaacactgtcgcggttgctaaggtaaacggaagggatttccagcaacgttaaggcatcgcgcacctgggcggcctcctggcggctgcgcaccagcacactgatgtcgctagcacgcaccggacgcgcgtcgtcgccgttcatcagcaacgcttcgccccgctgtccggcttgtagccagtcgcggatttgcgcagcacatacctgcgccatggtactttgataatcgccaacgccgcagctttcgccttccatcagccacattttcatcgcaggctgtgtttcacctttaaatacaaaacgtaacgcctgatttttcccggcacttttcactggaataaacggtatttcgcgaaacatgaacgcgtcatcagtctggctgaaaagcttattcacgctgttcaccattcctggtgcggaacgccagttggtgtctaaagtgtagtgggcgtgaacttcgctacgcgccttcatataagtgaagatatccgcaccccggaatgcatatatggcctgcttcgggtcgccaattagcaacaatgcggtttccggctgatggtgccagatacggcgaaaaattcggtactgctgggggtcggtatcctgaaattcatcgatcattgccaccgggaatcgcgtacggatcgccgctgccaacacctcaccgctttcgctacgcagcgcggaatcgagccgacttaacatgtcatcaaaacccaattcgccacggcggcgtttttcacgcgctactgtttcgcggatctcagccaatgcgcgggtgatcaccagatcgcggatgctcaatggttctgcaagcagttgatcgatcgcctcaaacagtggatgtcgcggggtttcccccccggccttcgtgcgatcttctaagaaacgctgggagaatttttccaggctctccggcaactgataactgtttgtctcttcttctgcccaggcgctgatcttgtcgatccatttagcctgattgctacggttaaacttgcgtcgatcaataccagaagattcgatcagcgcatccagttcacccactgcgtcgcgccactgctgttttaccgtatcaatacgcgccacaatttgcgcgtgacgggaagccagcgtttcatcatcgggcggcggtgctttgataaccggcgcttcgccttgcagataacgattaatatcgcgcagcaacgcctgcggccctttccaggtttcaaagacgacctgggctatttcacgcggcagcgggtagcagtggcgacgccagaaatcggcgcaggcctggtagcgtagcagagactcatcttcaatcagctgctgctcaaacagcatgccggattcaaaggcattcaggttgagcatgcgctggcaaaagccgtgaatagtaaagactgccgcttcatccatctgccgttcggctaacaacaaccactgcgcggcttgcgctttatcgtcgatctcttccagcaggcgttcgtacagtggattgtcggtggtttcacgcagacaggcgatgcgcaactcgtggatattgctacggatacgaccgcgcaattctgccgtggcagcctcggtaaaggtgaccaccagcagttcttcaacggtcagcgggcggggaaaggcggcggaaccgcctagtccaagtaacaggcgcaaatagagcgccgcaatcgtaaaggttttgcctgtgccggcagaggcttcaatcaggcgctcaccctgtaagggcaagcgcaaaggatctagtgtctcggcgacatcactcattcttttcactcatcaggggcattgtttgctgcaacgcgctgacgttctcccacactttccagccttcagggtgtacatattcggctttcccgttctggctgccggaaatctggctcagaatagccatgccttgcggctcgaccaccgcctgatggaagaaatcagcaagtttttgcggcgtcagcagttttatctgggccacgattttatcacggctatcgaagcgcatattgccgcgatcgaaatctttacttaacttgcttgcttcttcgccgagcgtttgcggtgcctgcagcatctgggtaattaccgcctgctggatttgcgcaaactcatctggcttcatcgctcgcaattttgcctctgcggttgggaaaaacgccttgtaacgctcccacaagaaactaggctgtttatcattgctttgcaaaaggaagcccatgccccactgacgccccacgctcattggaaacgcaaacacggcatagcccaattgttcttcggtacgcaactgattgtagaaccacggctgtacgatctgccccaacagagagctataggcactgctggtgtattcatcgtagccagtcggtacaaataccgctgccagtgcggagtcggtgctgttaccggctttttcaaagatgacggattgttttttatcgaccactacatctttgtttcgacaccactcactaccatcagcgcccaactgtttttgcacatcgcgtgccagcgttgttgcctgggcctcggtcatgttgccgataaccataaactctggtcgagccccactttttaaggcgtcgcgataggccagcacctctttcaacgtaatggagggcaaaattttacgccgttcatctcggctgaagtacggcacttggctgagcatctgcgcgggcataatcgcctgctcaaacgctttacccttttctgcggaatccatcatctggttataccaggacttcgcctgctcaagctgatcttccgtagcggtatagctaaagtacccctcgagcaatgcctggaacagctgcggcagacgctgggtgtaaccattagcattaaccataaggccgttgttagcgttggtggaaaaacttatgccaccaacgctcgcctggttgcttaactgatcaagcgccagccctgcgagataatcattgagcgcaaacatcacctgattgcgggcgctgtccatggctttcggattacgcaaaatcaggctgacatcagctttgggctcgctggcaaaataacggcttggcgcatacaccacgcgcagattgctctcatcaacaatcagctctggatggtcgtatttcttctcactcttaatcaggctgaaatcatcaggaatataagggttaagctctggcaaagagagcgcaatgtcggcggcttttttctgccagtcggcgaaagtttgtgcgctgattttatcgacctgatacggcgcatcgacaaagtaagccgttttgttgtgcggctctttcgggctgatataccagatacgcgcattctgcggcgtcatcatcgccagacgttcctttactgctttagcatcgtaccgatcggcaatattgactgcatccagcgtatgctcaacaggaacgcgaatcatggtatctgccagccattcgacgtaatccatatcacgggtgatgctcggataacggaagtcgatatccagcacattcgccagttcatcgaagtattgtttatcaatgcctttttcacgtaacagattgagatagctaaaaattgccgccacaacctgatcgcgattagccaggcctttatcggttaaagacgcagagatcgctaatacgccgctgttgccgttgacgataggatcggagttggcgctaatgccctcaactaatccctgcttttgcagccagtcagaaagtgtacctgggctgcgattgccaatcagataggtaatcaattcatcggttttactacggaacttcgcactgttgttatcgatgcgaaactcaacgcgcaacactttacgcggcagcgcagggacgtaatgaatgataatgcccttttgcgcgtcggtgactaccggcacggtgatttccggttttttgctctctttgttcggcacgcgaccaaaggtgtccgccgccatttttgccaactccggcagcggtttattactgtaaataaccgccttcatcaaattggcggaatagtacttctcgtggaaatctttcagcgcctgctgcaccggattaccaggtttgtcgcttaaagtttcgaggttaccaccagaaaacttactaccggggtgtgccgggttaatggtttctgcgctgacctgtgccatgcgcatcccgtcacgcgtacgcgccatggttaattcagcgttcaccgcattacgctcacgttcggcatatttcttgtcgagcaaaggttcagcaatagcatcggccaggcggtctaccgcaccaggcaaggcgtcgttctcaacttccagatagaaagccgtgcgatacggcgcagtgctggcattgtgactaccgccgtgcattttgagatattcggccagactgtcagcctgcgggtactttttgctccccatcagactcatatgttcaaggtaatgtgccagcccctggtacgcctcgggatcttccaggctcccaacgggcaccaccagcgcgctgaggcttttaactgcctgcggatcagaaaccagcaagaccaccataccgttatccagacgtatagcctgatactggcggttatctttatcacttttacggatggtttcctgaatcggctgccatcccgtttctgcctgacttaagggtgcccaaagggcaactaacaacaataatgctttgaaccaggtgctgcggggcattcacggacctcataatcaacttaattttctgtccagattcaacacgttaacgcaaatcatctgccagaatttaatcttgtgctgcacgagtcagcctatgtttatataaccatcagtccgtgactggtgcgcatcataaagtaagcggatagattgcgcaatttttatacagcactcaactctgattaaagcgaaacagcggtaacaggaaacgttggctctgttcaacgatggcctccattgtctctggtgttaattgccgccagagcctttgataccagatatcatcaccttcgccacgcaccatcatgttgccttcgtaagcctgaaggaatttcgtacgggctttttgcaacgtggaatcgtcatccagcatggcatcgttttgcgcgtcataacaggtttttagccacgcgccgccactttcaggtaacaccagcaatggcgcggacattccttcacgatacccctcaatcagttgactgaggtaatgcaaagcctgttcggctgcaagcggcggaaaacgccactcgccgtctttgcgtagaaaaaggcgactttcaccattaccaccgctggcacagtagacaaggtgttccagccaaagttgcattccctgggccacacttaataaagagggacgccagcgcaacaggccatccggctgcacctgcggcaaccagccagttatctgcacaccgttgcaggcgagatcaatttccatactctgccccggctggcgacaggcaatgactctgtcggcaagctgctgcatctcctggcactgtgtttcccagaaaatttcaccaaaagcgccatacggtaaatcccctgccgctcggaagcggcggaacaagcgttcggcatcatcctgctcaaccagtgcattcaataactgctgattgatttgataacggctaagtccttccagaataaatggctcggtgtcggggatttcgctgtcttcagtacggaagttcacctgcaaacgcatctggaaaaatgcccgcaccggatgtgcccagaatcgttgtagcgtttccagcggcacggtttccggtaaggtaaacggcagcggctgaacaaattcagaatgtgctttaccagcctggctggccgcaggtagccattcacgagcatagctttgtcgttcgcctggctggtagttttgtggatcaaacggcatccgggtatggaggcaagtaagatgcgcttttacccttgcctcgctttcatcacagttgagcgcttcatcgcccggtagataatgactttgcccgatgtagtcgatcagttcctgcaccagtacgctcgggaaacgctcactgttatcctgaatggaacgaccgatatagctgatatagagtttttgctgcgcggaaattaacgcttccaggaacagatagcggtcgtcatcgcgacggctacggtcgccacgcttcggtttctggctcatcaggtcaaagcccaatggcgcaagctgacgtggataaacgccgtcgttcattcccagcaggcaaaccactttgaacggaatactacgcattggcatcagagtacaaatgttaaccggtccggcgagaaaacgctggctgatacgttcttgatccagacgctgtgccagttcatcacgcaatagactcagcggcaccgcgtcgccatactgcgcacctaaaccttcggcgataatcgcctgccattgttgttcgatcagcgtcatcgccgcttcggtttccgcatccggcaggaagaaggcgttgagcatatcgcgacaaaccggcaaccactcttccagcggacgctcctgtgccagcccgcgacgccagatgtttagctgcattagcagactagccagatgccccaccagttctgcaattaagccgctgctttcatcataaggtagaacgctttgccactcgccctgcgcgctctccatcgcgtagcccaacaacatacgcgtcaggccaaatcgccaggtgtgttgtccggtggcggggagttccagctcgcgaacgttgtcgtcatctatgccccaacgaatgccggattcgttgacccactggcgtaaataacgcagcccttcttcggtgatgtcaaaccgcgccgccagcaccggcacatccagcaacgccagcacatcctcactcacaaaacgactgtcaggcagacttaacaggctgataaacgcttccagtaccggatgactctgccgcgcacgacggtcggaaatggcgtaaggtaggtaacgatccgcaggtgcgctaccaaacacagcctgaataaacggactgtagctgtcgatatcagccaccatcacgatgatgtcgcgcggagtaagtgtcgggtcttcctccagcatcgccagcaggcgatcgtgtaaaacttcaacttcacgctgcgggctatggcaaacgtggaaggtgatactgctatccagtggatcaagcgggcgtttgttatcgctacgggaaaactcttcgatgttcacaccagcaacggcgcggttttccagttccagaatgtcagactgaatgttatgcagcaggttatctggcgtgacatcgacaaaggcgtccagctcctggctgctctccaggtcagaaaggagataaatgtagtcgcgcccaagcttaccccaactagccagcagcgggttgccgacatcctgttcaccatcgctgttaaagagctgcccggcattttcgctatcacgaaatagcggcaattcgcgatcttcaaaactgtgtcgacgctgacgggtcagcagtttcgccagataagcaggatctttaatatcgccccagtaataacggcaggggttggtaaacaggagatggatttcaatatgtttacccagcgcctgtagcgcctggagataaacaggcggtaacgcggaaataccgcatataaagacgcggctaggtaaccccggcgggcaggtcgtcgcggactccagcgtttcgataaagcgctgatagagattggcgcggtgccagcgcggttgcccgagttgatgggtatattccaccagcgccttccacaacggggcttgccaggcctgtgcttctcccagcccttcaaccaaatgtcctgtttcccactgtgccagccagtccggacgatagaccagatactggtcaaacaggtccgccgctttactggaaagctggaacagttttcgcttgtcgctatcgtcagtcagataatgccgcaacagggtaaagtcttcgcgctccagcaattgcggcagcagagtcatcagtttccagctcatgctctgtttgttaaaggcgctctctttggggatttccggtaacacccggacgaacatatcccagataaagctcgctggcagcggaaaatcaatgtttgccgcaataccaaacttttggctcagggtcatttgcagccactgtgccataccggtactttgcaccagaatcatctctggttcgaaaggatcgtccagccgttcgcgttcgacaataaactccatcaacgcttccagcacgtccagacgattggaatggtagacccttaacatagcggctcctgattactgacgattcgggcaatgcaggcgggtcatctcgccttctctgcccccgggactaactagcgtaacgctgatgctgacacatcccgcctggcttgtctgcattcggttgacctgccagttggcaggtgggctaatcgcgcgcagttgcgtttgctgccagccatgccgccagagctgttggtactggtttctgctggcaagactgttcattaatgttcgctggaaaccgcttaacgcagtgacaatcatcaccatcaacaccatcgccaacattacctccggcaggctaaagccttgttgattcttcagggaagcactcataacgccctctctttcagcggttaaatcagggaagctgacataacgccctctctttcagcggacaaaaatcgctccagccgcgtgggctaaaaacaatgtttccatcaatgacttcgcctgttcgccacaagctaacgccttcataaccggcaatcaataaggcttcattatctgccagtaaacgcaaacaaacctgggcatcggtttcagcgtactggctgcactgaactgctggctgcgtctgccagcagtgcatttttccccacgccagcgcgctctgaacgatggcctggcggcgcaaactctgactttccatgctcacgcgagaggcaaaactgcgatcctgttggctcattccttgtaatagcaaactacccaaaaccagcagcatcaggaccagagccagactgctaacacccttttcgcggttcacaggttgaatcctgtcacgctatagctggcattcaccacggtttgcggttcagacttactggcagcacgcatattaaccgtcaacaccgggctgaagccgctgacatcctgacgtacgacctgaaaagtgtcgataatgatggcatccggattagtgactttatcccagcccttaccttcacaggatgtcgcaccgcgtagcgtttccagcacatgctccttcagacgaaatccaatctggtcggactcttttaccggttcgcgatcccagataccgttactgttcgcatcccactgcacaatgacacagtcaccctgtccgacaatttccagcccttcgccggtacagatgccatgacaataacccgccctctggagatgcttcgcgacggtaaatacccgcagccagatttcatcttccagcgccagcttacgggtgctcgttaaactttcacgctgtaacgcaggcagaaagcgtgccgcccccagcaacaatacgccactgatcgccatagcaatcaacacttccagcagagaaaaaccttgctcttttacaggcatccttctgtttctccttgctgacaaagccggagtcttccccacgggctaaccaccagccaccactcgcccgtactgtttttgaagcgaatatgcccggcccatgcggtattgcgcaggccaaagaaagcaaggctaggtgtcaggtcgctcatttcgacttcgggccagcgtggcacaaagaccaatggactactgccatgacaggtattggccccagcagcggaactcacaaggcaccataacgtcccctccctgataacgctgatactgtggtcgcggttatgccagttggcatcttcacgtaaatagagcaaatagtcccgcgcctggctggcggtttgccatagccgttggctctgctgccagtattgccagccatagagtccacttgcgcttagcatgaccaaaatcagcatcgcgaccagcgtttcaatcagcgtataaccacgttgtgttttcatgccggcagtatggagcgaggagaaaaaaagacgagggccagtttctatttcttcggcgcatcttccggactatttacgccgttgcaggacgttgcaaaatttcgggaaggcgtctcgaagaatttaacggagggtaaaaaaaccgacgcacactggcgtcggctctggcaggatgtttcgtaattagatagccaccggcgctttaatgcccggatgcggatcgtagccttcaatctcaaagtcttcgaaacggtagtcgaagatggattcgggtttacgtttgataatcaacttcggcagcggacgcggttcgcggcttaattgcagatgagtttgatccatatggttgctgtacagatgcgtgtcgccaccggtccagacaaaatcacccacttccagatcgcactgctgcgccatcatatgcaccaataacgcgtagctggcaatgttgaacggcaggccgaggaagacgtcacaggagcgctgataaagctggcaagagagtttgccgtctgccacatagaactggaagaatgcatggcacggtgccagcgccattttatccagttcgcctacgttccacgcactaacaataatgcggcggctatccgggtcgtttttcagctggttcagtaccgtagtgatctggtcaatatgacgaccatctggcgttggccaggcgcgccactgtttaccatacactggcccgaggtcgccgttttcatcggcccattcgtcccagatggtgacattgttttcgtgtagataagcaatgttagtgtcgccctgcagaaaccacagcagttcatggatgatggaacgcaggtggcaacgtttagttgtcaccagcgggaatccatcttgcaggttaaaacgcatctgatgaccaaaaatggaaagcgttccggttccggtacggtcgtttttctgtgtgccttcgtcgagcactttttgcatcagttctaaatactgtttcatggttcctcaggaaacgtgttgctgtgggctgcgacgatatgcccagaccatcatgatcacacccgcgacaatcatcgggatggaaagaatttgccccatgctgatgtactgcacccaggcaccggtaaactgcgcgtcgggctggcggaaaaactcaacaatgatgcgaaacgcgccgtaaccaatcaggaacaaaccactgacagctcccattgggcgtggtttacgaatatacaggttgaggataataaacagcaccacaccttccagcagcagctcgtaaagctgacttgggtggcgcggcagcacaccgtaagtgtcgaaaatggattgccactgcgggttggtttgcagcagcaaaatatcttctgtacgggagccagggaacagcatggcaaacgggaagttcgggtcaacgcggccccacaattcaccgttaataaagttgcccagacgcccggcaccaagaccaaacggaatgagtggtgcgataaaatcagagacctggaagaaggaacgtttagtacggcgggcgaagataatcatcaccacgataacgccaatcaggccgccgtggaaagacatgccgccgtcccagacacggaacagatacagcggatcggccataaactgcgggaaattgtagaacagaacataaccaatacgtcccccgaggaagacgccgaggaagcccgcatagagtaagttttcaacttcatttttggtccagccgctgcccggacgattcgcccgtcgtgttgccagccacattgcaaaaatgaaacccaccagatacatcaggccgtaccagtgaagcgccacgggtcctatactgaaaatgaccggatcaaactccggaaaatgcagatagctactggtcatctgtcaccacaagttcttgttatttcgctgaaagagaacagcgattgaaatgcgcgccgcaggtttcaggcgctccaaaggtgcgaataatagcacaaggggacctggctggttgccggataccgttaaaagatatgtatatgatccgcgttataaccctccgcgaatcagcccgcccatgccgcgacgctccataaaggctgcaacctgatggcgaacttcggtcgccagttgcgcttccagactacgctgcgcaagattttctgcttcggcataatcaatgcgccgcagcaggtattttgcccgcgctacagaacgtccgttcatagacagatggcgatacccaagcccaatgaggattgccacgcacatgggatcgcccgccatttcaccgcacaaacggagatcgattccatgtatttccgcttcccgggcgatcatcgccagagctcgtaacattgcaggatgaagactgtcataaatgttcgccacccgggtattgttgcgatcaacggccagaatgtattgagtcagatcgttggtgccaacagagatgaaatcgacccgctttgccagatgcggcagcataaataccatactcggcacttccagcatgatgccgatacgtggtttgggaatttcgtaaccgatcatctcctcgacttcacgtccggcacgttcaatcaggcggcgtgcttcatcaacttcatcgaggcttgtgaccatcggcaacagaatattcaggttgcccgtagcggcattagcacgcagcatcgcccgcacctggatcaagaagatctccggctgatcgagcgtaatgcgaatcccacgccaacccaggcatggattctcttcgctgatcggcatgtaaggcagctgcttatctgctccgacatccagcgtacgcaaggtgacgggtttatcattgaacatttgcagcatcccctgatactgcgccacctgttcttcttcgctcgggaaaccactttgcagcatgaatgggatttcagtgcgataaagaccgatgccatcaatacggctgcccagtttttcttcatgttccgggcttaaaccagcattgagcatgacttttatacgctcaccgctttttaactgcgcgggtaaattgacgtcatcttccgccagacggctaagctcaatctcttcactaattagccgctgatattcttgcagcagtaccggctccggatcgaccagcaattcaccgcgatagccatcaacgatcagcgtcctacgatgcagcacgctaggctgaatatccgcgcccatcacggtagggatccccagcgcacgtaccatgatcgcagcatgggagttggctgcgccatctcgcacgacaacaccgactaagcgatcctggggcagctcagcaagcgttgtcgcactcagttcatctgccaccagaatgaaacgttccggccaggcgttcggcccttgattagcgtcatcaagatgaaacagcaatcgctgacccagcgcacgtaaatcgccagcccgctctttgagatagttatcacttagcgcggcaaactgttcggcaaatttttcaatgaccgtttttaccgcccactctgccacgctgcctttatcaacctcggcaaacaattcgcgacgcagccgggtgtcgctaagcaggtggctgtaaagatcgaaaatagccgccgtttctttttgtgcaccggcggcaaagcgtttgctgtagcggcgaaactcgtttgccgcttcttccagcgccccggtcagtcgttcgcgttccagagccggatccagcgtacttgcctgatacacctgttccattaaaggtaacgtggcatcctgccagccttcggcaatcgccacaccaggtgctgccggtaatgcgcggattcgcgtctggcgatattgcccaaacaaggcagtcaactggctctgagaaagaatagctgccatctgggtggcaagcgtcaccaggaaggattcttcactttcgtcatactggcgcaactctcgttgctgtaccaccagtacaccaagcaactggcgacgttgaataattggtacgcctaaaaacgcgcggaaacgttcttcttttacggaggggatgtatttgaagctggggtgcttttgcgcatctgcaaggtttatcggttccgccagcctgccaaccaggccgacgatcccttcatcaaacgcgagcgttacagtgcgaccgcgtggttttttcagcccccgggtcgccatcaggtagtaacaacgtcgatcatgatcggccaggtagacgctacagacctcggtatccatcgcaagacagatgtcggtaaccagaatatttaacgcctcattcaggcgtggtgcgctggctaccttttcgactatttcgcgcaggcgagtgagcataattggcgtgacttaacctcttttacgtcgataagcagatgcgttttgtggttttggcgtattttcctgcagactcatcaccacactcgcgaactctttcattaccctacggtagacatcacgtttaaaactcaccacctgtctgaccggataccagtaacttacccatcgccagccgtcaaactctggtgtactgctggtttgcatattgatttctgcatcgccgctcaccagctgcaagagaaaccatttttgtttttggccgatacaaaccggcttcgtgtcccaacgcaccaaacgtttcggtaatttgtagcgcaaccagttacgcgtactagcaaggattcgaacgtctttgcggcttaatcctacttcttcaaacaattcacggtacatcgcctgctctgcggattctccggggttgattccgccttgcggaaattgccaggagtgctgaccaaatcgccgggcccacattacctgcccctggcgattacaaatcacgatacctacgtttgggcggtagccatcgtcatcaatcaccggactacctcaaaataaagctttatatacgaatgattgtttcatactccaggaagacggtaaaccactctctgcagggcattacacactaataacaattgaataactcacagttatgtgcagagttataaacagaggaaggggtggatagccgtttttattcaccttttctgtggatagagttgtgaagaactacggaattactacgggaaaacccggagcattctgaataagcccgatatagacattttaaaatattcattatcagtcaatgcattacatgtaattttagtaatgaaaaagagtaattcgtgacccaggtcacacctctcatttacgggttggcgaaagatcaaccaatgccgtatttatccacagaatgtgccactaagttaagcactgaaccactaaaaactggagtttcgtcgcacgtcaaggctgtaaatggaaacagtagtggaggtttttcacagttatcccagctttctgtggataacatggtgtaagatcctgtttattttcagtgaccagatttggaaaacccgttgcagtgttgcgcaactcgattaccggcaacctaaaaagcaatataaatcagagaattgaacaacgcatgtggaaaaagttacactgcgaatattcggcacataattgctgtttgttttttaatcaaggtatcatgacatgtcccaacctcgcccactgctctctcctcccgaaactgaagaacagttgttagcgcaagcacagcaactttctggttatacattgggagaactggcggcacttgtcgggctggttacgccagagaatttaaaacgcgataaaggctggattggcgtgttactggagatctggctaggtgccagcgcagggagtaaacctgagcaagattttgctgctctgggcgtggaacttaaaactatccctgtggatagtcttggtcgtccgctggaaacaacattcgtttgtgttgccccgttaacgggcaatagcggggtgacctgggaaaccagccacgtgcgccacaaactcaaacgcgtactgtggataccggttgaaggcgagcgcagcatcccgctggcgcagcgtcgcgttggaagtccgttgctgtggagcccgaatgaagaggaagaccggcagctacgcgaagactgggaagaattaatggatatgattgttctcggtcaggttgagcggattaccgctcgtcacggggagtatttacagatacgaccgaaagcagcgaatgcgaaagcgcttaccgaagccattggtgcccggggcgaacggattctgacgctgccacgcggcttttatttgaagaagaatttcaccagtgcactactggcccgtcattttctgatccagtaaccatcgctttgacctgccgctttccgggcatataattaccgcttcatttttttggcagggctttttagatgttatttgcatggataaccgatcctaacgcctggcttgcgctcggtacgctgacgctgctggagatcgttcttgggatcgacaatattattttcctttctctggtggtggcaaagcttcccacagcacaacgtgctcatgcgcgccgtctggggttggcgggagccatggttatgcgtctggcgctgctggcaagtatcgcctgggttacgcgcctgacaaatccgctttttacaatattcagtcaggaaatttctgcccgtgatttgattctgcttctgggtggcttgttccttatctggaaagccagcaaggaaatccacgaatccattgaaggtgaagaagaagggctgaaaacacgcgttagtagtttcctcggcgctatcgtgcagattatgctgctggatattatctttagcctcgacagcgtgattacggctgtgggtctgagtgatcacctgtttattatgatggcagccgtggtgattgccgtaggcgtgatgatgttcgccgcgcgcagcattggtgattttgtcgaacgccatcctagcgtaaaaatgctggcgctctctttcctgattctggtgggctttaccctgattctggaaagtttcgacatccacgtaccgaaaggttacatctacttcgcgatgttcttctctattgcggttgaaagcctcaacttgattcgcaacaaaaagaatccgctctgatactccgtacgctctcctgcgggagggcgtactcactccttttaccctcacagtttaagattttcctgctttcaagatatataacgtcggtttataaacagactattatcataggtaggccaaatgaggataaccggatgaaaaaatgggcagtaataatttctgcagtcggactggcgtttgctgtttccgggtgttccagtgattacgtcatggcgaccaaagatggccgtatgattttgaccgatggaaaacctgaaattgatgatgataccgggctggtgagttatcacgatcagcaaggtaacgcgatgcaaattaaccgtgatgatgttagccaaattattgaacgttaacaaataaggtcagcatccggctggccttaagatttttctctttcccttttcccttccctctgccatttttatattccttatgtcgtgattataaaaaggaaacggctatgcaatatcaccgtataccccacagtagcctggaagtcagcacgctggggcttggcacgatgacgtttggtgaacagaacagcgaagccgacgcccacgcacaactcgactatgccgtcgctcagggcattaaccttatcgacgttgccgaaatgtacccagtacctccgcgccccgaaacgcaagggttaaccgaaacctacgtcggcaactggctggcgaaacatggcagccgcgaaaagttaattatcgcctccaaagtgagcggaccgagccgcaataatgacaagggcatccgcccggatcaggcgctggatcggaagaatatccgcgaagcgctgcatgacagcctcaagcgcctacagactgattacctcgatctttatcaggtgcactggccgcagcgcccgaccaactgcttcggcaaactcggttatagctggacggattctgcgcctgcggttagcctgctggatacgctggacgcactggcagagtaccaacgcgcgggaaaaattcgttatatcggcgtgagcaacgaaactgcatttggcgtaatgcgctacctgcatctggcggacaaacacgatctgccgcgtattgtcaccattcagaacccttacagtctgttaaaccgcagttttgaagtaggtctggcagaagtcagccagtatgaaggggtcgaactgctggcctatagctgcctgggtttcggcacgctgaccgggaaatatctcaatggtgcaaaacccgctggcgcacgtaatacgctctttagtcggttcacccgctatagcggtgagcaaacgcaaaaagccgtcgcggcgtatgttgatatcgccagacgtcatggcctggaccctgctcagatggcgctcgcgtttgtacgccgtcaaccgtttgttgccagcactctgctgggcgcaaccacgatggatcagctgaaaactaacatcgaaagtttgcatctggagttaagcgaagacgtattagctgaaattgaagcggtgcatcaggtttatacttatccggcaccataagattaacgccggttaaaaccggcgttaaatattaatgacggcgctgccagatccacagcgccgttattgccagcgcaaacagcgcaccgaagccaatgccaatgggcacgaccgggatgcctatcattaccgccaggctgtaaatgcccagcatcaacaacatggcgctgttttcgccaaggttttgtactgcaatcgcattccccgccccgacgctttttttaccccgctcctgtagcaacgcattgagcggaacgacaaaaaagccccccatcacgccaatcagcatcaacaaggcataggctggcagcagctcgtgttgcagggaaaaaatcagtaccaccacgccaatcaaaatcccggctggcatacagcgactcacggtttccagcgtaactaacttcgctgccgcacctgcgccaaccacgataccaatcgctaccatcgcgttgagataggtgggcgtagcgttatcggtaatgcccagcgccaccggtacccacagcaccaacaggaaacgcagcgtgacacccgctccccagaataaactggtgcccaccaggctaaaacgcgtttcaccattgcgccataggctggtgcaggcattcaggaaactgcgggtcatgttgatgagattccaggactgccccggacgcgccgccgccagtttgggaatgtagatattggcaacgaccgcaccaccgtaggccagtgcgcatgcggccagggcgacgaggacatgccagtcagccagcacaccaccggctacggaaccgagcaaaatcgccgctatggtagaagcttccattaaaccgttagctttcactaacttactacccgtggttaattcgccgagaataccgtatttcgccggactataggctgcagcaccaacacccaccagcgtatagccgagaaacggattgataccaaagcagatactggctgcgcccagcagcttcaggccgttggcaaacatcatcacccggcctttggcgaagctatccgccacctgcccgacaaacggcgcaaaaagaatgtaagcacctacaaacaccatttgcaggatgggctggctccactccggatagaactgcgctttcagtaacgccagagtggcaaacagtagggcattatcgccaaacgcagagagaaactgcgccacgataaccgctttcatccccttgctccacaagctagtgttagtgtgcacactctcactcatcgtgttgttccgcttcgtctacccagcttttcaacgtgacaaagtcaggtttgccgctgccaagtaatggcatctgtttcagatagcgaatatcgcgcggtacagcaagctccggcacgccgtgctcgcgggcatactgttgcaacttatcgcgcgtcagttcgttatctgtggtgaaaagcaccagtgcctcgcctttgctggcatcgctcttaatcgcagtggcatggactttatctgggctaacaccaagtgccagttgttccaccatttccaggctcaccatttcgcctgcaattttggcaaagcgttttgcgcggccctgaatctgcacaaagccctgctcgtcaaaacgcacaatatcgccagtgtcataccagccgcgctccatttcgccgcgaacattctcggcggtgggcacttccagtacacctggcttctccacccgcagatagccgttcattatgttcggccctttcagttgcaggcgtccgccctcttcgataccagggacgctcaacaggcgcgcatccattcctggtagaatacgccctaccgtaccgggtttcgccgccatcggtacgttgatagaaacgacaggcgcgcattcggtcacgccgtagccttcaaggatgcgcaggccaaatttatcctgccaaagctgtttggtactttcttgtaatttttctgcgcctgccaccacatagcgtagacgatagaagtcatacgggttggcgaaacgcgcgtagtgaccgaggaaagtgctggtgccgaacaacacggtgcaactgcggtcatacaccaactccggcacaatgcggtaatgcagcgggcttggataaaggaacacttctgcacctgtaagcagtggcgtaaacaggcctaccgtcagcccaaaggagtgaaacagcggtaacgcgctcataaagcgatcgttggtggtgaagtcggcaatcgttttaatctgctcgacattcgccagaatgcttttatggctatggacgacgcctttcggatggccttcagaaccggaggtaaaaaggatcagcgcctcttcttccggctgctgtttaacctgtgccagacgcggcatcagcaaatgagcgaagatccatactttgtcggcagtggtgacatctgcttttaaatcttccagatagacccagcgcacctgagtaagttgctccggcagatgccagagtttgcctttatcgagaaactggcgggaagtgaagatggttttgatttcagccgccgtaatagcactggtcagcccttttaccccggcagtgtagttcatcattgcgggcatgcggcgacgggcgatggccccaaaaatcactgccgcactgatgcctgcattgggcagcattaagccgatgcgttcgccttcaacactgtatttttcaaggatgcgtccaacaaacagcgttttcgtaagcaatttgcgataggagtctggggtaaagttgacgtcttcgacacatttcttcccggctccgaagcggtacattgcactcagtaaagattcgtacagcgtttcacgcgggcgcaccgccattcgcgcttccatcattatttgatgcagcatttcgccagcgattttgcgacggtcacgggcacgcggcgcatccggcatcgccacctgcgttggtggcaaaatatgcagagtaatttgcgggaacaagcgacgtttaaccagacctttcaggcggctgaagtgcgtaagttccgccccttcaatacgcacaggaataaccgtcgcaccagacttcgccgcgacaaaacccgcgccatcgtagattttcatcaggctgcctgtcgtggtgatgcgtccttcagggaaaatcaccactggtcggccctgttccaccagacgtaccagatgtttaatagccataggttgcgtcgggtcgagaggaacaaagtcgataaaacttttcagccaacgcatataccactgttggcttatactggtgtaaacggcaaacactggacgcacaggtaaaaacagtccaagcaaaatgccatcaataaaagagacgtgattaggcgtaattagaacgcgctcgcccttcagtgcctgggtgtcacccgtaacgcgaacgcgatacaaaacacggcacaaatttcgaaaaaagctaaaaagcattccaactccctttgctctgattcagtaaaagcgaatggagggagattacacgagataaagaacgcgagcgacagtaaattaggtgcgaaaaaaaacctgcgcatccgcgcaggttggtgcaagagacagggtacgaagagcgtaccgaataatctcaccaatcaatacctctgggatcttgattgtggtctgcacgacgactcttcgccagcgagaaaacgcaaaggaatgaagggaaatgcaacgaggtgtgtaaattgtcggttactgttacagattgatgaccggcaaaaaaaacctgcgcatctgcgcaggctggtgtaattcatgtgctcaacccgaagttgacttcacctatcaatacctctgggatcaccactttagcaacctgaagccaaacgccaccagcggtcaatcgcaacagcgtttcgcaaagtgtaaccaaaggtttgcaatctctttttttgtcttacttatttgcgtttggctcacattcccacgatgaaaacacgccaccccttgaaccaacgggcgttttccgtaacactgaaagaatgtaagcgtttacccactaaggtattttcatggcgaccataaaggatgtagcccgactggcaggcgttagtgtcgccaccgtttcccgcgtcattaataatagtcccaaagccagcgaagcttcccggctggctgtgcatagtgcaatggagtctcttagctatcacccgaacgccaacgcccgtgcgctggcgcagcagaccactgaaacggtcggtctggtcgttggtgatgtttccgatccgtttttcggtgcaatggtgaaagcggtcgaacaggtggcttatcacaccggtaattttttattgattggcaacggttaccacaacgaacaaaaagagcgtcaggccattgagcaactgatccgccatcgctgtgctgcgttggtcgtccatgccaaaatgatcccggatgctgatttagccagtttaatgaaacaaatgcccggtatggtgctgatcaaccgtatcctgcctggctttgaaaaccgttgtattgctctggacgatcgttacggtgcctggctggcaacgcgtcatttaattcagcaaggtcatacccgcattggttatctgtgctctaaccactctatttctgacgccgaagatcgtctgcaagggtattacgatgcccttgctgaaagtggtattgcggccaatgaccggctggtgacatttggcgaaccagacgaaagcggcggcgaacaggcaatgaccgagcttttgggacgaggaagaaatttcactgcggtagcctgttataacgatagtatggcggcgggtgcgatgggcgttctcaatgataatggtattgatgtaccgggtgagattagcttaattggctttgatgatgtgctggtgagtcgctatgtgcgtccgcgcctgaccaccgtgcgttacccaatcgtgacgatggcgacccaggctgccgaactggctttggcgctggcggataatcgccctctcccggaaatcactaatgtctttagtccgacgctggtacgtcgtcatagtgtgagtactccgagcctggaggcaagtcatcatgcaaccagcgactaaccgcagttaaagcaattccagcgccagtaattcttcgatggtctggcgacggcgaatcaaccgcgcctgaccattatcaaacagaacttctggtaacagcggacggctattgtagttggaactcatacttgcgccatatgcccctgtatcatgcagtaccagataatcacctgccttcacttccggcaaggcgcgggtttcaacatttcccccttcctgctgggtaaagacatcgccgctttcacataacggtccggcgacgacggtttccaccgttggcgcgtgttccagagaacgaccatcagctgccagggcactgatatggtggtaactaccgtacattgccgggcgcatcagatcgttgaacccggcatcaaccagcacaaagtggcggctccccatttgtttgacgctccgcacctgagtaattaatacgccagactgcgctaccaggaagcgacccggttcaatttccagtttcacagggtggcccaaatggcgggcgatttgctcacgcgcggcattccacagaccataataatgttcggtatcaaccgcctcttcaccctgttgataaggaacagaaagcccaccgcccgcagaaatagcctgtaaatcctgaccgaattcgatgacctgacgcaccatagcaccacacacctgttccagatgggcataatcaacgccagaaccaatgtgcatgtgaatgccgaccagctgcagatgatgacgttgtatcacgtccagtgcggcgggcagatcggtgtaccagataccgtgcttgctgttttcgccaccggtattggttttttggctatgtccgtgaccaaaccccggattaacgcgcagccatacccgatgccctgggctaacctggcccagttggtcgagcatatcaacagaacccgcattcaccggaatttgcaattcactgacgcgttcaagcgtcgcctgatcgataacatctgccgtaaaaacaatatcatcggggtgcgtttgcggattgtaacccgccgccaacgcacgctctatttcgcctaagctgacggaatccactttcacgccctgctcacgcattaagcgcaaaatatgaatattggaacaggctttctgtgcaaagcgcaccacatcaaactgtttcagcgctgcaatctgccgacgaataatttgcgcatcgtagacccacaccgggcagccaaattcagcgggcaaacgcagcagattttcggcggtgagatcggtatcggtgctgaacagactatgtggcataacaaactccagataagtgcttttttatgattacgccacatcataaaaagaataaaaaatatcgatttatgtcgagtctatgcaaaaatgatatggattaccggattgcgagagagcgctaatggccgccgttaacttacgtcatattgaaatttttcatgcggtaatgaccgccggaagcctgactgaggcggcacacctgctacacaccagtcagccaaccgtcagccgcgaacttgcgcgctttgagaaggtgatcgggctgaaattgtttgagcgcgtacgtgggcgattacatcctaccgtgcaaggactgcgtctgtttgaagaagtgcaacgatcctggtacggactggatcgcattgtcagcgccgcagaaagtctgcgcgagtttcgccagggagaactgtctattgcctgcctgccggtctttagccaatcttttttaccgcagctcctgcaaccctttctggcacgttatcccgatgtcagcttaaatatcgtgccccaggaaagtccgctacttgaagagtggctcagcgcccagcgtcatgatttaggactcactgaaacgctccatacgcctgcgggaacagaacgtaccgaattactctctttagatgaagtgtgtgtgttacctccgggtcatccgctggcggtaaaaaaggtattaacgccggatgattttcagggtgagaactacatcagcctttcccgtactgacagctatcgccagttgctggatcagctatttactgaacatcaggttaaacgacgcatgatcgtagaaacccacagcgccgcgagtgtctgcgcaatggtacgggcgggggtaggtattagcgtggttaacccgctcaccgcactagattatgcggcaagcggtttagtggtgcggcggttcagtattgcggttccgttcaccgtcagcctgatccgccccctgcaccgcccgagtagtgcgctggttcaggcgtttagtgggcatttacaagcggggttaccgaaactggtcacttctcttgacgctattttgagcagtgctacgacagcataattagctcagcataaaagcgacagcatcctcggcatggatcgccgcggtatcaaacacaggcaaaacactgcgctcttctggcaccagtaaaccaatttctgtgcagccaaaaatgacgccctgtgcgccctgttctgcaaggcgagcaatcacttgcgcacaataagcgcgactcgcttcggtaaattgccccagacacagttcttcaaaaataatctgattaattttcgcccgttcatccgcttcaggaataagacaattgatggaaaattgttccgtcagccgcccgcgataaaaatcctgttccatggtgtaacgcgtacccagcagcgccacacgagtcattccggccccggtaattgcacgtccggtggcatccgcaatgtgtaagaaaggcagagtgcaacgactctcaatggcatccgccactttatgcatcgtattggtacatagcacaataccttctgcgcccgcccgctgtaagccaagcgccgcctcagccagaatgtccccggttttatcccattccccgcgacgctggcactcttctatttcatgaaaatcgacgctatgtagcagcacttgcgcagagtgaagcccaccaagccgctgtttaatgccttcatttatcaaacgatagtaaggaatggtggattcccagctcattcctcccagcaaaccaattgttttcattcctctctcctgatgtgtgttaccgcaacaaggctgaataaggaacgagacaaacgcctcaacggccaagtgcccaatctctattaacgaaaaaagggccggatgtacagcacatccggcccgtgaaatcagacgccgatatttctcaacttctcgcctgccatcagtttgcgttcgatatgttccagcgtgacatttttggtttccggaatgagccagaaagtaatgcccacaaacgcaatgttcagcgcagtgtagagccagaacgtaccggcagcgccaatgctatcaagcagtgtcaggaaggtcgcgccgataatcatattgctcacccagttcgtggtggtgctacaggtaataccgaaatcgcggcatttcagcggctgaatttcagagcacaggatccacaccactggcgcggcgctcatcgcataaccggcaatacacatcatcgtcatgccaacagagagccaggacaagccactggaagccgtaccgttatcaaactgcatcaggcaatagcccagcaccagagtgcctaacgccatcacgctgaaaccaattttcagagccggtttacgccctgctttatctaccgtaaacaccgcaataaaggtggcgaacataaaggtcagccctacgaccagagtcgcaatcatctgttgttctgtggtcgtaaagcccgccattttgaagatacgcggcgcgtagtacatgatgatgttcataccggtaaactgctgcatcgcctgcaacaacataccgagaaacacagcacgacggacgttacggttgatcttaaacagtgcccaaccgccctgttttaacttcaggctttcacgaatttcgttgagttcttctcgcgctttttcgctcgtatcgcgcagcatacgcaatacttcttccgcctcaatatgacgccccttttccgccagccagcgcgggctatttggcaggaagactaccagaataatcagcagaactgctggtaaagcaagaacccccaacattgcgcgccagttaccgctataactgaacgctgtatcggataaaaacgccagcacgatgccgagtgtgaccatcaactggtacatactgatcatcttaccgcgaacgttttcacttgccatttcagaaagatacagaggagcggtgtaagacgcgatcccgacagcaatgcccagcaccacacgagcggcgattaacatctctacgctggtcgcaaaagcggaccctatagaaccgagtacaaacaggatggcccccgccatcaggctgtatttacgccccaggcggaagctcagccaaccattaaacagcgcaccaattgctgcaccgagcatcatgctactaaccacccattcctgcaaacgactggtcagcacaaagtgatcggtaatgaacggcaacgctccggcgattacgccgatatcaagaccaaataacaatcctgcgaccgcagcagctacgctaacaaacatattcatacgccgcgtatcccgcaaagaacgtggcgttaaagcagattccgtattgatagtaaccattttttcctgccagcagagagtaagacatagtgaaaaaatacgtgaacaactcacgcaggtgtcaggtcggaaacagcataaatatggattaaattgctgcgacatgtcgttatgtgatggatattccaattttcaaattaagttgaattattgagattattattaaccacctaattttacagcagataaaattcataaagttcattaattgataattaatatggattatttcataaccatgatatggattatgatgatctacaggtataaaaaaccctgccatgcggcagggtcataaaagtaagaagaatgaattaacgcgccagccaaccgccatccacggcaatggtataaccattcacataatcactagcgctggaggcaaggaacactatcggccccatcaggtcactcggcagtccccaacgaccagctggaatgcggtcgagaatttccgcgctacgttgttcatctgcccgtagttgttgagtattgttggtcgccatgtaacccggggctatcgcattaacattaatgttgtgtttagcccattcgttcgccatcaatcgcgtcacacccatcacgccgcttttacttgcggtataagaaggcacacggatcccgccctggaaggagagcatactcgcgatattgataatcttgccgccattgccttgcgcgataaagtgtttcgccgctgcctgagacatgaagaatacgctcttgatattcaggttcatgacatcgtcccagtccttttcgctgaactcgagagcatcttcgcggcgaatcaatccggcgttattcaccaggatatcaatatgaccaaactccgctaccgcgcgatccagcagtgctggaataccatcaatctttcgcagatcggcggtcaggcttaaaaaacgacgccccagcgctgtgacctgctcgatggtttcagtcggttcaacgatgttaatgccaacaatgtcacagcccgcttgcgccagccccaacgccatcccctgacccagtccagtatcacaaccagtgacgaccgcaactttaccttcgagagaaaatgcacttaaaatcataacaataccttattcgtttatgcccacaattagcgcaaatctttaacggccacatggtccatatcatcaaagacctggttttcaccgaccatgccccagataaaggtataagctttggttccgacaccggaatggatgctccagctcggggagatcaccgcctgctcgttatgcatcacaatatgacgcgtttcttgcggctgccccatcatgtggaaaacgcaggcgtcatcatccatattgaaatagaaataaacttccatccggcgctcgtgggtgtgacacggcatggtgttccacaagttacccggagccagctccgtcagccccatactcaattggcaggtttccagtacatccgggacaaaatatttgttaatcgtgcgacggttactggtgaggttatcgcctaacgtgactggagatacttcgtccggtgtgacttttttggtgggatacgtcgtatgcgcgggtgcgcaattgtaataaaacttcgccggagtgccggtatcaatactggcaaagacaacttcttttgcacctttaccaacatacagggcgtcgcggtgaccgatttcatagcattggccatcgacagtaatcgtaccggcaccgccaatattgataacacctaactcgcgacgttcaaggaaatagcttacgccgagttgtttaccaacttccccgccaacggaaaccgttttagttatcggcataatgccgccaacaataattcggtcaatgtggctgtaaaccatggtgtactcatcggcgacaaataccttttcaaccaaaaattcattgcgcagcccttgggtatccagcgtttttgcgtgcgcactgtggatgctctgtcttacgtccacatcaacctccgataatcagtgaagcgtgaaaatagaaaacgatagtgaaacactgtttcgttttctctataaagggatgatatgcccatgggctagggttttcaattaaaaataaaacaatgtttcatttttaagttaaggattaaaaaaagtgcagtgtcgatcacgaatatgtcatgagaatggaaaaatgagggagcccagaaaatgtatgtcgacttgccagccatcattattcaacagattaatgacggcagatatttatcggtaaggaggaaatgcagagttattcgtcacgttcaatggtcaatgccacaccctggcccccgccgatacaaagcgttgccagtcctttgcgggcattacgtttcaccatttcatgaaccagagaaaccaggattcggcaaccggaagcgcctatcgggtgaccgagtgcgatcgcgccaccattgacattgacccgacgctcatcccactcaagcatcttgccaacgctaagcgcctgtgcagcaaacgcttcattagcctcgataagatcgacttcagccaactgccagcctacacgctccaggcaacggcgggtcgcatacaccggcgcaattcccatcaatgccggatctacaccaacgctggcaaatgcgcgaatgcgggccagcacgggtaaattcaacgctcgtgctttggcttcgctcatcatcattaccgcagctgcgccatcgtttatggaacttgcattacccgctgtcacagaaccgagactatcaaaactaggatttaaacgggctaagccttctgcgctggcgtcagtgcgtggctgttcatcggtatcaacaaccaacgtctgcccgttactttgggtcattaccgggacgatctcatctttaaatcgtccggcgtcaatcgccgctcgcgctttttgttggctgctaagtgcgtaagcatcctgcaactgacggctgatgccatattcgcgagccagattttcggcggtgacaccaatatgataatcattgaaggcatcccacaacccatcatgcacaagactgtcaaccaactggctattgccaagctgtgcaccggtgcggctatcagtcagaacatgtggtgcgcggctcatgttttcctggccaccggcgatgacaatatcagcctcgccacactgtatcgcctgagtagccagatgcagtgctttaagcccggaaccgcaaacgtcattaatagtgattgcagaaacgctattaggcagaccacctttaatagcgctttgccttgccggattctgccctgcccctgcagtcaacacctgaccaagaattacttcatccaccgcatatgcaggaacgccggtacgttctattaacgctttcacgaccagactaccaagttccacggcggaatgacccgctaacgcaccacgaaagcagccgataggtgtccgtaacgccccgacaatcacaacgtctttcatcacaacctcgcaccaattaacagtgcaatagtaaatgattgttaattacagttatcttaattgtttaaaaaaagtgatttttatcacaaaggaaatatgcctgagcagcagtcagagacataactggcacgtaaggtttgcaaccactaacccaccaatagaggggtagatagggcgttaatctcccatacttaacctggtttatggtaaattgccctccattttgtttaatttgtagatgatacgttcagataatgtctaatatttggtctaaagaagaaactctgtggagtttcgcgctctacggcacagccgttggtgcaggcacgctcttccttcctattcagttaggtagcgcaggggctgtggtcctgtttattactgctctggtcgcctggcctttaacatattggccacataaagccttgtgccagttcatcctcagtagtaaaacaagtgcaggtgaagggataacgggcgcggtaacacactactatggcaagaagattggtaatctgattaccacgctgtacttcatcgccttttttgtcgtcgtgttgatatatgcagtggcaattaccaacagtcttacggaacagctggcaaagcatatggttattgatcttcgcatccgtatgttggtgagtctgggtgttgtattaattctgaatctcatttttctgatgggacgtcatgccactattcgggtaatgggatttttggtattcccattgattgcctatttcttatttctttccatttaccttgtcggtagttggcaacctgatctattaacaacccaggtagagttcaatcagaatacccttcaccagatatggataagcattcccgtgatggttttcgcctttagccatacgcccattatttctacgtttgccatagacagacgtgaaaaatatggcgaacacgctatggataaatgcaaaaaaattatgaaagtcgcttatctcatcatctgcataagtgtactgttctttgtctttagctgcctgctttctattccacctagctatattgaagctgctaaagaagaaggggtcaccattttaagcgcgctttctatgctgccgaacgccccagcatggttgagtatttccgggattattgtcgcagtagttgcgatgagcaaaagtttcctgggtacgtactttggcgttattgaaggtgccacagaggtcgtcaaaacaacactacagcaggttggtgtaaagaaaagtcgtgcatttaaccgcgcactaagtattatgttggtaagcctgattaccttcattgtttgttgcattaacccgaacgcgattagcatgatttacgcgatcagcggcccgctcattgccatgatacttttcatcatgcctacgctgagtacgtatctcatcccggcgcttaaaccctggcgttccatcggaaatctgattacgctgatcgtgggtatcctgtgcgtaagcgtaatgttctttagctaatatcagttgtggatggttcaaaattgctacaattttgaaccattccatttttcataatattcatttgttattattccaccctatcacttctctcgtcatatcctagtattatcagttagttaaacacacaaagagatctgaacatcttaaataagactatttaagatgcataacttagattcgcaagatatcttctggtcattcaaaaacaatttgcgatatagatattcttataccatgagatagttatctggaccgctctcaaccatgcaagattaaatcagtgaaacataatcatatttgataacgagaaatgcatttttaaatgccttactcagaattatagcaaatacagattaatcgcaatttttcccggcaaaattacaaaatcatggtgtattgacatcatcaataaccaatgaaattatgcaattatatacggatagggaggttcttaacatggggctttgtagtcgttataaaagtcttacatgcaatagttgcagtatgcattgccaaataatgccagaagagagtccgcgtttgcagtattgcgcaaacagctgtttttgtatgtggcccgaagaaagtagttattttaatcgtggtgtggtagaaggtatcttaacaaaaaaccacaatgcgagattaagcggatatatttttgtcgattttagtgtaagttttttacgtctattccttgaaaaagactggattgactatcttgcaagtactgacatggggattgttttagtcagcgaccgcaatatgcaaagcttagctaattactggcgaaaacacaacagtgcaatatctgctgtcatatataatgatgatggtcttgatgttgccaatgaaaagatcagacaactatttattggtcgttatttaagttttaccggaggtaacacattaactcagatggaattcaccataatggggtatatggtttctggttataatccatatcagattgctgaagttctggatatggatatccgtagcatctacgcgtacaagcaacgaatcgaaaagagaatgggtggtaaaataaacgaattatttattcgtagtcatagcgtccaacattgatactcaacgaccagccagaatcatactctgtttatacgggcatttattgaaatgtccgtattttataaataggccgtcccctcaagagtaaacaccatagtatttaaaaccatcacacgaaaaattcagaagcattacgaaatatgaatttacaaacaatagtggcataaatgttaaccatgttaatttacgtaaagttttacgttgcaacattaaagcctcatttcaatcatcatgataaatataaaattaatatatatttatgccgtaaataccaatatacttagcaaactatgtgatctccatttcgattgatttagtgtttattgacgtatgtactggattattaacgataatatcgagttctggcctgagcaccgaaaattaataagcgtacataacgccgatcttaacgtcgttctgacaacgccagccagtcgatgtttaagtcttctacttgaagcttttcctgatgtggttgcacaacaagattttttcaccagagtctgggaagaagaaggtatgcgtgtgcctactaacacgttatatcagaacatatccattatcagacgcggatttcgcgctgttggtgatactacccacagcctaattgcaaccgtgccgagaagaggattcaagatccataatgacattaacatacaaaatcatgtaataaacagcagtacagacgcacatacacacaatgccccacctgccataaaagttaatgcgggatacaaagagagcattggtggcgcaaagaatttcaataacaaaatcctcaaacatataaaaagtcatctaattatgttgagcgcatttgtcataggcgcatattctgcatattggctatggaataataatcaaccgaagccatttttcaaggattacaagactgttgcggaaattaatggctgccattttaatgtaacagaagatacaattgatgggttgaaagagttcgataaatataaaacacggatactggatagcgggattaactgtaaaaaacatccgtggttatacttccctcttgcaaaatccagtccggggatgattgttatggcatgcaataaaaactataaccaacatgaagtggcaaactgtttaaccctgtcttaccgtgaggttaatcgtgattgattataaaaaaaacttattatttattttagtttttatcagtgggtttattctcttcactgtctattcttacactgcagaaaaaatgatatataacgaaacatgcactgcaaattgggtaatttttaatgaccagggacgagcaaatcttaccatcgactttatgtataacaaaaaaaataaaacaggaactgttgcgttgagtggaacctggcaacaaggtaacagagaaagtaaaagtatacggcgaaatattgaatacacatggattgaaaactatgacacagcccatttaacaagtaagaaagttaataagtttgagattatggatcaagttgatgatgatagacttgcacaacttattcctgatttttatgtctttccagaaaaaagtgtaagctataatatactaaagcaaggtaagcatgcttttattttgagcattggtaacagagcaataatgcattgtgcaaggtaaactaaaatagataacaaaaagatggaacctcgttaatcataaaacaataaaattaaatattctcgcagtatatggcagtctaaagcatcaaagatttgatcaacatctttcattttagacatctccttgcaatgtaaaatatcatgtatcaacaacatctggtgcaaatccaactgtcgaactcgacattcatcttagctcgattattattccttcgtacagtgcttgtaaacaatacagaaagaggattattaagaaccagtttactcagactatcaatagaggaaaggactaacgtttctttaaaagaattgatttcatcatctgttaaactaaactcatcattgacagatcgactgatataactgtttttaactttactctttacgttgactttattgacagaattaacattcacatatctactatttaatgtccaacttgttgtttgcgtgagaacattctcagcattaaggaatttttttaacggaatccttggtttctttttgctgtcgctatttacaatatcatgcatatagaccatttcatgaatctggctaaattcaatgtccattgtatacctcacatttttaccgtgactcgatgttactgttcaataatcaccttccatcaatactaaaattaatacccctaatgtgccgataacaaatatagtcattctacgtaacgtctccataaggtgatatttgacattatcagaagctgcgaattcggattttgctctaatcaaatgagagaaatgtaaaatgaagccacgaaatattaataatagcctaccactgcaaccattagttcctgatcaggagaacaaaaataagaaaaatgaagagaaatccgttaatccagttaaaatcacaatggggtctggtttaaattatattgaacaagaatctcttggaggaaaatatctaacacatgatttgagtataaagatagcggatatttctgaagagataattcagcaagcaatattatctgctatgagcatatataaatttagcataacagatgatttaatgagtatggctgtaaatgaactcataaaactgaccaaaatagagaataatgtagacctgaataaattcactactatatgcacagacgttctatccccccgcgtcaccagacataataaagaaaaaaacaaacgacattctacccttctcaaaaatcccctttttaattttcattgaaaaaatggcaattgatactatgaatccaggtcatacacattaaggcatttatgtaatgtcgtaattaagataactaataaggtgaatattagtaaaacaactaatgatgttattagtttgtagtgaacagtacttttaccaataatgaaaaatataccataagcaatgcaagcttaaaactcataatttaaaaaagataaatataaaaatatcaatgagtcaatcaataataatttggcatcacgagacacatcacagaggaatattatgagcacagaaacaattgaaatattcaataatagtgatgaatgggcaaatcaactaaaacacgcattaagcaaaggagaaaatctggcattactacatggtttaactcctgatatccttgatagaatatatgcatatgcattcgactaccatgaaaagggtaatataacggacgcagaaatttattataaattcttgtgcatttatgcgttcgaaaatcatgagtatctaaaagattttgcaagtgtatgtcagcccaaaaagaaatatcaacaagcatatgacctttacaaactaagttacaattacttcccgtatgatgactatagtgttatttatcgtatgggtcaatgtcagattggggctaaaaatatcgataacgcaatgcaatgtttctatcacattattaacaattgtgaggatgatagtgttaagagtaaagcgcaggcatatattgaactcttaaacgataatagtgaagataatggctaagcattacaatcatttggttaaatttgctggttatagtgcagttaaccactataaccagcacctcttatgttttcttaaatcagcatcttaaaacagttaagagcatactataaatcattatttttcaatgcgttagagaacaatctactttatcaaaattgaataaggctatttcagattacatcactgaattcctaagataaattagtgaacacaaccatagatatgtcaaatgtaatttcctgtagcgttaatgacacataaatatgaatagccataatttctattgcttaagcaggatgcaagaaaccaattttttcatagaggttaactaatggacttagaaaataaattcagttatcattttcttgagggattaacgctcacggaagatggaattcttactcaaggaaatgagcaagtttatattccacagaaagagttaggtgtattaatagtattacttgaatccgctggtcatgttgtactgaaagatatgatcatcgaaagtgtatggaaaaatattattgttagtgacgagtccctgacaagatgtatctattctttgcgctgcatttttgaaaaaattggctatgatcgttgcatagaaacaatctaccggaaaggttatcgtttcagcgggcaggttttcaaaactaaaattaatgaagataatactagtgactattccatagctatattccctttcactactagtttgaatacactggatccattaatacttaatcaggaattagtgcaaatcattagtaataaaaaaatcgatggtctctatacctatccgatggctgcgacaaatttttgtaatgatcacatatctcaaaatagtttcttgagcagattcaagccagattatttcgttacaggaagaataaaccagaataatgcagtgaacactttatacattgagttgatcgacgctaaaaaccttttcctcatcgccagtaatcatctccctgttgatgaactacataatacaagtcaatttattatagataatatccttcaaacggtacataaaccagaacgatctgtaagattagctaagcaggaccaaggatataagaatcattatttaagtgatgaaatgttagccggaaagaaagaactttacgacttcacccctgaaagcatttacagggccatgactatatttgatagattacaaaataaaagtgatatacagacgctaaaaacagaatgttattgccttctagcggaatgccatatgtctttggcacttcatggaaaaagtgaacttgaacttgctgctcaaaaagcattagagcttttagattatgtaagtgacataaccactgtcgatggaaaaattttagctattatgggactgataactggtctgtctggacaagcaaaagtatctcatatcttatttgaacaggctaagatacacagtactgatatagcctctctctactactatagggcactagtccactttcataatgaaaaaattgaagaggcaaggatttgtatagacaaaagtctacaactcgaacccagaagacgaaaagcagttgtgataaaagaatgtgtagatatgtatgtgcctaacccgctcaaaaacaacattaaactctactataaagaaactgagagtgaaagccatcgagttataattgacaacattttgaaattaaagcagctgacgagaatttgtatgcgataaatttttattgacgcaattttattatttagatgtatgcaacttgttatttaaacaacagagataaaaatatctaagatattcaccttattgcaagatatttaaaatgctctagagttaaaagtatgatgtaaagaccattggcctggacaattaaaaaagggagctttatgactaatccaatcggtatcaataatttatctcaaagtagtaatatagcgaatgcaacgggtgatgaagtcgtaagtttagataaacacatcaacaccagtgctactgatacagatcaaatacaagcatttatagttagtacatggatggcgccttttcaaaatgatatgtatagtgaagataatcctatcagtccttactataaaattgagtggtaaacgattgaccaaataaatcataacgagatacttttataatagtatctcgttcctttcattcaatcctcacacatgaaaaaatatgcgctcaccaaaagttaaattcttaaccatcttcacgttttgtatatttattacaaaaatgtctttcgccagcaactcttgctctaatgaagcaggaacaatgttcagaatcgaaccaaatttaattaaagctatcgctcttgttgaaagcaatctaaaaaaggatagcataggcaagaacagagataagaataacaatataaagagtttagattattggttaatgcagataaaccagatgcatattcccctgttaaaaaaacgtggaataataaaagatgaacgagatttgttagataacccttgtctgaacattaaaataggaaccgagattttatataaccattttagtcgttgtggagtaacgtggcaatgcctggggacttataatgcgggttttgcaatggataaccaaaaaaagagacagcaatatgccccaaaatatatattgtatataccaggcttaatgaactaaacaatcgtaaggcttcagcaaaatgagcctaaagcctcttttttttatatagtgcaaacacccatacgtaaagctgttttgatcaactcgataccactgtgaacatctaatttcttcatgatattgagtctatgagtttcgactgttttcctgcttaactgcaagaaattagcgatttctttgtttgttttaccatcagctatgagttgtaatatttcactctcacgatttgtaagttgattatcagaggaatacctggaagatattttttcacaatccatatgtacactatcaaaataagtgtaaccattactaatgctatcaatagcacgatttagtttcgccgggtgactggttttccatacgcatcctttcgcacctgcttcaagcaattttatactatcaatatacggcatctttgctacaaatgtaataatatgagcatctatcttatggcttttaacccattttacgagttcggcccccatcattccacctgcaaattctcctaaaataaatatttaggctgtagatttgttacactccgctatagctttcttcagatctttatagcccacttatttaacaacttgaaaataaggtgttttacctgggttgttacaaaaggattgcattgcgtaaacgctttttatttacaacaaaatggggaagtattacggcgaagataaattggagcgggcgaagggaatcgaaccctcgtatagagcttgggaagctctcgttctaccattgaactacgcccgcttcgagatgcgtaaggcattataaaccttacgctctccttagcaagtgccacgctgctgactgctgattaattcgccatcagcattttggcttgctgccctgaggcggcaagtaacgtagcggatcaattgccgttgcacggtaacgaatctggaaatgcaggcgaacagatgccgcatccgtgctccccatagtggcgattttttgcccagccttcacgctttgcccattatttaccagcatcgtgtcattatgggcgtaagccgtaatgtaatcttcactgtgtttaatcatgatgagattaccgtagccacgcagctggttgcccacatacaccacctttcctgcacccgcggcgtaaataggtgtaccccgtggagcactgatatcaatccctttattgccgccatctgctgtgctatacggcatgataactttccctgtcgttggccataaccaacaacgttgccctactggcggccaggaacttttcggtaccgcactactcggtgtaacgcttgcggttttggtcgtacttttggcggtacttttacgtgtaatactgctacttttcgccccacccagttttagtttctgaccaacttcaatggtgtaagggggggaaatgccgttcagtcgcgccagttcttttacgctggttcccgtggtgcggctaatacgatatagcgtatccccccgtttcacggtgtaaacggagccggaatacgttcctgtatcggaacttttgctaccgctacagcccgccaaaagcagtccaacgcttaacaacatcacgatacccagagattttttattcaggcgtcccgcactcaaaatctttcctcgcttaaaaaacaagacgccttatcatagcagccagcctcttgatacccaatctcttgcttctggaaaaacgtggtaatagagaaagaggttaatttcatttggcaaagggaagtatcatcagcaaaatattcgctgtagaggtatcgaacttcctgactttttaccctatttcccatcctgatgcgtaataatcccaatttatcacattgattttatcgccactcatattgatacgtatcactgcccctattcagagtcctgtttcgtatcatatctgtgtttttttaacgtcatcacacttcctacctcccctaacgcttatcgtcgtttctggcgtaaatcttgcctgcttagactaaatctttgccataagaaccaaatgttcaaatcgaggggatttctatggaagcgcgggaagcaaccgctacgggtgaatcatgcatgcgcgtcgatgccattgctaaggtcaccgggcgggcacgatatactgacgattatgttatggcgggcatgtgttatgcgaaatatgtacgtagccctatcgcacatggttatgccgtaagtattaatgatgaacaagccagaagtttgccgggcgtactggcgatttttacctgggaagatgtgcctgatattccattcgctacagctgggcatgcctggacacttgacgaaaacaagcgcgataccgccgatcgcgcactgctaactcgccatgttcgtcatcatggtgacgccgttgccatcgtcgtggcccgcgatgaactcacggcagaaaaagcggcgcaattggtcagcattgagtggcaagaattacccgttatcaccacgccagaagcggcgctggcagaagacgctgcaccaatccataacggtggcaatttactgaaacaaagcacgatgagcacgggtaatgtccaacaaacaatcgatgccgccgactaccaggtacaggggcactatcagacccccgttattcaacattgtcacatggaaagcgtaacaagcctggcgtggatggaggatgacagccgaattaccatcgtttccagcacccagatcccgcacattgttcgccgcgtggttggtcaggcgctggatattccctggagttgcgtacgagtcatcaaaccatttgtcggtggcggttttggtaataaacaggatgtactggaagagccaatggcggcattcctgaccagcaagcttggcggcattccggtgaaagtttcccttagccgtgaagagtgtttcctcgcaacccgtacccgccacgcttttaccattgacgggcaaatgggcgtgaaccgcgacggaacattgaaaggttatagtctggatgttctgtctaacaccggcgcttatgcatctcacgggcactccatcgcttctgcgggggggaataaagtcgcttacctttatcctcgttgtgcctacgcttacagtagtaagacctgctataccaacctccccagcgctggtgcgatgcgtggttatggcgcgccacaagtcgtatttgccgttgagtctatgcttgatgacgccgcgacagcgttaggtattgatcctgttgaaattcgtttacgcaacgccgcccgcgaaggagatgctaatccgctcacgggcaaacgtatttacagcgcagggttgccggagtgtcttgaaaaaggccggaaaatctttgaatgggaaaaacgccgtgcagaatgccagaaccagcaaggcaatttgcgccgcggcgttggcgtcgcctgttttagctacacctctaacacctggcctgtcggcgtagaaatagcaggcgcgcgccttctgatgaatcaggatggaaccatcaacgtgcaaagcggcgcgacggaaatcggtcagggtgccgacaccgtcttcagccaaatggtggcagaaaccgtgggggttccggtcagcgacgttcgcgttattagtactcaagataccgacgttacgccgttcgatcccggcgcatttgccagtcgccagagctatgttgccgcgcctgcgctgcgcagtgcggcactattattaaaagagaaaatcatcgctcacgccgcagtcatgctacatcagagtgcgatgaatctgaccctgataaaaggccatatcgtgctggttgaacgaccggaagagccgttaatgagcttaaaagatttggcgatggacgctttctaccaccctgaacgcggcgggcagctctctgctgaaagctccatcaaaaccaccactaacccaccggcgtttggctgtacctttgttgatctgacggtcgatattgcgctgtgcaaagtcaccatcaaccgcatcctcaacgttcatgatagtgggcatattcttaatccactgctggcagaaggtcaggtacacggcggaatgggaatgggcattggctgggcgctatttgaagagatgatcatcgatgctaaaagcggcgtggtccgtaaccccaatctgctggattacaaaatgccgaccatgccggatctgccacaactggaaagcgcgttcgtcgaaatcaatgagccgcaatccgcatacggacataagagtctgggtgagccaccaataattcctgttgccgctgctattcgtaacgcggtgaagatggctaccggtgttgcaatcaatacactgccgctgacgccaaaacggttatatgaagagttccatctggcaggattgatttgaggataacatcatgtttgattttgcttcttaccatcgcgcagcaacccttgccgatgccatcaacctgctggctgacaacccgcaggccaaactgctcgccggtggcactgacgtactgattcagctccaccatcacaatgaccgttatcgccatattgttgatattcataatctggcggagctgcggggaattacgctggcggaagatggcagcctacgtatcggctctgcaacgacatttacccagctaatagaagatcctataactcaacgtcatctcccggcgttatgtgctgcggccacgtccattgctggaccgcagatccgtaacgtcgctacctacggtggaaatatttgcaacggtgccaccagcgcagattctgccacgccaacgctaatttatgacgcgaaactggagatccactccccgcgcggtgttcgtttcgtcccgattaatggctttcacaccgggccgggcaaagtgtctcttgagcatgacgaaatcctcgtcgcctttcattttccgccacagccgaaagaacacgcgggcagcgcgcattttaaatatgccatgcgcgacgcaatggatattagtacgattggctgcgccgcacattgccgactggataacggcaatttcagcgaattacgcctggcatttggtgttgccgcgccaacgccgattcgctgccaacatgccgaacagactgcacaaaatgcgccattaaacctgcaaacgctggaagctatcagcgaatctgtcctgcaagatgtcgccccgcgttctagttggcgggccagtaaagagtttcgtctgcatctcatccagacgatgaccaaaaaagtgattagcgaagccgtcgccgcggcggggggaaaattgcaatgaatcacagcgaaacaattaccatcgaatgcaccattaacgggatgccttttcagcttcacgccgcaccaggcacgccgctcagcgaattactccgcgaacaaggactgctaagtgtcaaacaagggtgctgcgtgggtgaatgtggtgcctgtacggtgttggtcgacggcacagcaatagacagttgcttataccttgccgcctgggctgaaggaaaagagatccgcacgctggaaggtgaagcgaaaggcggaaaactttctcatgttcagcaggcttatgcgaaatccggcgcagtgcagtgcgggttttgtacgcctggcctgattatggctaccacggcaatgctggcgaaaccacgcgagaagccattaaccattacggaaattcgtcgcggactggcgggaaatctttgtcgctgcacggggtatcagatgattgtaaatacagttctggattgcgagaaaacgaagtaaaaggatatccggcctgaattcaggccggattcactgaggttatgtgtttaacaactcatatttcttaatcttgcgatagagcgtagcaatgccgatgcccagttcatcagcaacttgcttcttgctgttatgacgactaagcgcctcgcggatcatttgcttttccatctcctccagcgccgtgccgcccgcatcatcgagactcaggtgcgcctcactgacctctgttacatcactttgctccgttgtgccattattcagcagatttggcggcaatagcgtgctgtcgataacttcaccactaggaaccacgttaaccagatattccatcaaattgcttaactcgcgcaggtttccgggccaacgatgcttacgcaatatttcgacgacatcgggagcaatgccaggataaacgcttcccagacgacgggtatgcagatgtaaaaagtaatgcaccaatagttcaatatcttcctgacgttcacgcagcggtggcagagttatcgggataacattaagtcggtagaagagatcttcgcggaatttaccttcggcaatgaactgggccaaattctgattagttgcagaaatgatgcgaatgtcgacttgtattgggctactggcaccaatcggcagaatttcacgtgcctcaatagcgcgcagtaatttagcctgcaacattaatggcatatcacctatttcatcgagaaacagcgtgcccgtattcgccgcctgaatcaaccctgttttaccgttggcagaagcgccagtaaatgcacctttaacataaccgaacagttcgctctccagaagctgctccggaatcgcggcacagttgatagcaataaagggtttattccgtcttccgctcaacttatggattgcacgggcgacgacttctttacccgtgccgctttcaccaaccaccataacgctggatgggctgggtgcaatacggctaatgagtcgttttaattgccgcataacacggcactcgccaaccaattgttcaatatgcggttcatcaggtgcatttgctacagaaaaactggtatggctttggtgaaacgccattaaaaataattgtcggccctgaatgttatgcaattgaccaatgattaattcacttttatcgtcccaactaacaatatgctgcatatgtccatgggtaaaattactctcaaatgttaatggtctgaaacggataggtttcccaataatattattttgcacaacaccaagtgtttttaaggcagtctgattaacaaactgaacccgattttcatcatctacaactaatacgccctgatccatattatcgatcatggtcgcaaatattttactgatgttatctcctggcccctgatcctccagaagtttgctaacaaaaatggtggatatatggcgaacataatcagaaaattcgcgtaaattatcactgatatgctcttgttgctcgtgggtaacggcaatcaaacttatcaccccaacacaacgatcctgtaaaatgacaggcgtacccagaaatgctttttcgcggcaattttctttactatcgcaaccttcgcaaaggggatcgaagcgagactgtgtcacaactttttcagttttcgtttccaggacgtggcggagcaggcgactgttgccgctcaactggcgaccaagaaacttcccatacgcgcccgttccggcaacgcgacacaagttttcatcaacgatctcaacctcaagctgcaaaaacgctggcaagcattctggcaaaacgctgaattgtcggttgaatttgcatcaatacactctgcgtagtagcaagctccatagctttaccttccagacttacttaaaagtcgatcattgaagacgttgatggttcacagatcatgatgatattaactcaggcgaaattggctttgataaaaacataagatttttatcattttctaatgaaattatggaagagatatcacatttctatatcaatatgagaattacggcggtgagtttatcaaactgaagagagatagcctgcccctttatcttatttctgatacttagcagcaaataaataacgcgataaaaaaagccaaacgttttcgtattttacaaacaaccagaagctggcatcaatttgtgatcaaccccacacattatccgtcaaattagtcttttgcagccgcgcggataattctggcacacttattgttagtcccaggtatagctgtgaaaacaccaatcactttggcaagtcacagtgaaataaaccactttgcctgtcattccactaccgggactttatgatgaaaactgttaatgagctgattaaggatatcaatagcctgacctctcaccttcacgagaaagattttttgttaacgtgggaacagacgccagatgaactgaaacaagtactggacgttgccgcagcattaaaagcactgcgtgctgaaaacatcagtaccaaagtctttaatagtggattaggtatttccgtattccgcgacaactccacccgtacccgcttctcttatgcttccgcgcttaacctgctcggccttgcacaacaagatctcgacgaaggcaaaagtcaaatcgctcacggcgaaaccgtgcgtgaaaccgccaatatgatctccttctgcgccgacgctattggtattcgcgacgatatgtatctgggcgcaggcaacgcctatatgcgtgaagttggcgctgcacttgatgacggttacaagcagggtgtactgccacagcgtccggctttagtgaacctgcaatgcgatattgaccacccgactcagagtatggctgacctcgcgtggttacgtgaacactttggtagtctggaaaacctgaaaggtaaaaaaatcgccatgacctgggcctactctccaagctatggcaaaccgctctctgtaccacaaggcatcatcggtctgatgactcgcttcggtatggatgtcaccctggcccatccggaaggctacgacctgatcccggatgtggttgaagtggcgaaaaacaatgctaaagcctccggtggtagcttccgtcaggtcaccagcatggaagaagccttcaaagacgcagacatcgtttatccgaagagttgggcaccttacaaagtgatggaagagcgtactgaattgctgcgtgcgaacgatcacgaaggcttaaaagcactggaaaaacagtgtctggcacagaacgcgcaacacaaagactggcattgtactgaagagatgatggaactgacccgtgatggcgaagccctgtacatgcactgcctgccagctgatatcagcggcgtatcctgtaaagaaggtgaagtgactgaaggcgtattcgaaaaataccgtatcgctacctacaaagaagccagctggaagccttatatcatcgccgcgatgatcctgtcccgtaaatacgccaaaccaggtgcactgctcgagcaactgctgaaagaagcgcaagaacgcgtgaaataacccctcgggccgatcagctggtcggccctctatttccagaggccaaaaggataggatatgtccgttttcagtttgaagattgatatcgccgataacaaatttttcaacggcgaaacaagtccgctctttagccaaagccaggccaaactggcgcgccagttccaccagaaaatagctggttatcgcccaacaccgctttgtgcgctggacgatctcgcaaacctttttggtgtgaagaaaattctcgtcaaagacgaaagtaaacgattcggtctgaacgccttcaaaatgcttggcggtgcgtacgccatcgctcaattattgtgtgaaaaatatcatcttgatatcgaaacgctgagttttgagcacctgaaaaatgccatcggcgaaaaaatgactttcgcgaccaccaccgacggcaaccacgggcgcggtgtggcgtgggcagcacagcaactcggacagaatgcggtgatttacatgccgaaaggttctgctcaggaacgcgttgacgccattctgaacctcggtgccgagtgcatcgtcacggatatgaactatgacgataccgttcgcctgaccatgcaacacgcgcagcagcacggctgggaagtggtacaggacacggcatgggaaggttacaccaaaatcccaacctggatcatgcaaggctacgcaaccctggcagatgaagccgtcgagcaaatgcgtgaaatgggcgtaaccccgacgcacgttctgctgcaagccggtgtcggagcaatggccggtggtgtgctgggttatctggtcgacgtctatagcccgcaaaatctgcacagcattattgttgaacctgacaaagctgactgtatttatcgctccggcgtcaaaggcgacatcgtcaacgttggcggtgatatggccaccatcatggcaggcctggcctgtggcgaacctaacccgctgggctgggaaatcctacgtaactgcgccacccaattcatctcctgccaggacagcgttgccgcattaggtatgcgcgtgctgggtaatccgtacggcaacgacccgcgcatcatctccggtgaatccggcgctgtcggtttgggcgttctcgcagcggttcattatcacccgcaacgtcaaagcctgatggaaaaactggcgctgaacaaagatgccgtggtgctggttatcagcactgaaggcgacaccgacgtgaagcactaccgcgaagttgtctgggaaggcaaacacgctgtagcaccttaatcaccctattggaactgctccctgcaaaacggggagtaaaaaatctggagaaaaataatggctaagaatattccattcaaactgattcttgaaaaagcaaaagattaccaggcggatatgactcgcttcctgcgcgacatggttgctattcccagtgaaagctgcgacgagaaacgcgtagtacatcgtattaaagaagagatggaaaaagtcggcttcgataaagttgaaatcgacccgatgggcaacgttctcggttatatcggccacggcccgcgtctggtggcaatggacgctcatatcgataccgtcggcattggcaacatcaaaaactgggacttcgatccgtacgaaggcatggaaactgatgaactgattggtggtcgcggtacttccgaccaggaaggtggcatggcctctatggtttatgccggtaaaatcattaaagacctcggtctggaagatgaatataccctgctggttaccggtacggtgcaggaagaagactgcgacggtctgtgctggcagtacattattgaacaatccggcattcgcccggaatttgtggtcagtaccgaaccaaccgactgccaggtataccgtggtcagcgcggtcgtatggaaattcgtattgatgttcagggtgttagctgccacggttctgcaccagaacgcggtgataacgccattttcaaaatgggtccgattcttggcgaattacaagaactctcccaacgtctgggttatgacgaattcctcggcaaaggcaccctcaccgtttctgaaatcttcttcacatccccaagccgttgcgctgtagcagacagctgcgcagttagtatcgaccgtcgtctgacccggggcgaaacctgggaaggcgcgctggacgaaatccgcgccctgcctgcagtacagaaagctaacgcggttgtttctatgtacaactacgaccgtccgtcctggactggcctggtttacccaaccgaatgctacttcccgacctggaaagtggaagaagatcacttcaccgttaaagcactggtgaatgcctacgaagggctgtttggcaaagcgccggttgttgataagtggaccttcagtactaacggcgtatctatcatgggccgtcacggcattccggtgatcggctttggcccgggtaaagaacctgaagcgcatgcacctaacgaaaaaacctggaaatctcacctggtgacctgtgccgcgatgtacgctgcaatcccgttaagctggctggcaacagagtaattactcttcacttattcccctccggttcgccggagggtttttggagtttgctatgcgcgtattgatcaaaaacggcactgtcgttaacgcagatggacaagccaaacaggatttgctgattgaaagcgggattgttcgccagttgggcaacaatattagcccgcagctcccgtatgaagaaattgatgccactggctgttacgttttccctggcggcgtggatgtccatacgcatttcaatattgatgtcggcatcgcgcgcagttgtgatgatttttttaccggtacccgcgcagctgcgtgtggcggtacaacaaccattattgaccatatgggatttggcccaaacggctgtcggttacgccatcaactggaggtttatcgtggttatgccgcccataaagcggtcatcgattacagctttcacggtgtgatccagcacattaatcacgcaatcctcgacgaaatcccgatgatagtcgaggaaggactgagcagttttaaactctatttaacctatcaatacaaactcaacgatgacgaggttttgcaggcattacgccgcttgcatgaatccggcgcgctgaccaccgtgcacccggaaaatgatgcggctatcgccagcaagcgggcggaatttatcgccgcagggttaaccgcgccgcgctatcatgccttgagtcgccctctggaatgcgaagcggaagccatcgcccgcatgattaacctggcacaaattgccggtaacgccccgctctatatcgtgcacctgtctaacggcttaggtctggattatctgcgtcttgcccgtgcgaatcaccagccagtctgggttgaaacctgcccacaatatctcctgttggacgaacgcagttacgatacagaagatggcatgaagttcattcttagcccaccgctgcgtaacgtacgcgagcaggacaaactgtggtgtggcatcagcgatggtgcgattgacgtggtggcaaccgatcactgcaccttcagcatggctcaacgcctgcaaatttctaaaggcgatttcagtcgctgcccaaatggcttacccggtgtggaaaaccgcatgcagttactgttttccagtggcgtgatgacgggacgtataacaccggaacgctttgttgaattaaccagcgcaatgcccgccaggttgtttggcctgtggccgcaaaaaggattattagcgcccggttccgacggcgacgtggtgattatcgacccacgtcagagccaacaaattcagcatcgccatctccacgacaacgccgactacagcccatgggagggttttacctgtcagggcgcgattgtcagaaccttatcccgtggtgaaacgattttctgtgacggcacctttacaggcaaagccgggcgaggtcgtttcctgcgacgcaaaccgtttgtccctcccgtgctctaaccactgccagggatctatacacaatcaagaatgatgagtgaggaaaaatgagtaagaaaattgttctcgccctgggcgggaatgcgctgggcgatgacctggccgggcaaatgaaagcggtaaaaattacttctcaggcaattgttgatttaattgcccagggacatgaagttatcgtcactcatggtaacgggccgcaggtgggcatgattaaccaggcctttgaagctgccgcaaaaactgaagcgcacagcccaatgctgccgatgtctgtctgtgttgcattaagccagggttatattggttacgatctacaaaacgctttaagagaagaactgctttctcggggcattaataaacctgtagcaacgctggttactcaggtcgaagtcgacgctaacgatccggcattcctcaacccgaccaagccgatcggtagcttctttaccgagcaagaagcagagcaactgacaaaacagggttacactctgaaagaagatgctggtcgcggctatcgccgtgttgttgccagcccaaaaccggttgatatcattgaaaaagaaacggttaaagctctggtagatgcaggtcaggtggtgatcaccgttggcggtggtggtatccctgttattcgtgaaggtaaccatctgcgtggtgccagcgcggttatcgataaagactgggccagcgcccgtttagcagaaatgattgatgccgatatgctgatcattctgactgcggtagaaaaagtggccattaacttcggtaaagagaatgaacagtggctcgatcgcctgagtttaagtgatgctgaacgctttatcgaagaaggtcattttgcgaaaggttctatgctgcctaaagtggaagctgccgccagctttgctcgctctcgcgcaggtcgtgaagcactgattaccgtattgagcaaagcgaaagaagggattgaaggcaaaacaggaacggtgatttgtcagtaatttaaaggccgggtgggtaataccatccggccaaagattgtcaagtaagtgcgctttgttgatgccggatgcggcgcgagcgccttatccgtcctacaaaacatcgcaaattcaatagattgcaatgcacttgtaggcctgataagcgtagcgcatcaggcaatttggcgtttgtcatcagtctcaggccgggtgggtaataccatccggccattttcatttaagccacttccagcacttcttttgtcgctttcacgccctgatgcatcaacatcattaacgcctcaagtacgccgccgccaatcgcccgggctttatcagaaacgctggtgaaatcagcggtttcaccacgaggatcgatatcaccaattttaaaaccaccaaccactgccaggccgtcgttcaacaagccacgcaccatccccgtcaacggtgctttaatttcatgctcaccaatccaggcaatcacatcgccctctttcaccagatcgcctaatttcacgttggatcgcataatgcctgcagcaggagcacggatcacccgtcgggtggtatgccccataatattgccaggaacaccggtattctcctgcgcacaaccagagtaaatcacctgaccgagccagtgcccgcgatttgtttcaattaccgcatgacaatccttcccagcagtaaagcccggcccaagcgcgattgttactggtgccatatctgcccgcgttcccaaattctgtttcgccagaatagcgtccaccacgcaaagcggtttcagttcatcaagcaaactacaggcgggatctaccatcacaggaatgaatccgcgttcggtaagtttcatcgcttccgcagagctggttgccaggcgagcagtgacgccttcgaccgtcatttcgccatcgaacacggcctgggcaaacgccacggtacaacgaatcactgtcggtttttccacttccagcatgatcactttaaaacccgcatgatacagacgtagcgccacaccactggcgatatctcccgcaccgcgaatcaccaccagctggtgtccggaaggatgagaaggtttcatcatcagcccacccggcgcgttatttttcacctgtaatatttctgccagcacgctgatggcgatctcctgcggcgtttccgcacctatgttgtaaccaacgggcgcatgtaaacgggcaatatgttcttcagccacgcctttctcacgcaattgacgcaggaaaagctgaaccttgcgacgacttgccagcaaccccaaccatgcaatgggctgttcaatgagtttgtcgagggcttcacgatcctgattattcgtggcaatcaggacaaaattatcagggcgaatatccagtgcttccactgccgcaccaaagctctcagcatggagaagcgtggtacttggtgggaatagttcaggattgaggctttcgcgataaatatcagcaacggcaatatcaaatcctaatagcgccgcactctgggctatcgcccggttgacatgccccgcgccaatcaacaccagacgtggacgcataccatggacgctgataaatacactcattgcacctccacaatcactcccgacagcatccgcaccgttacgagccatacgtccatggaataatcgcggcttacgttcctgcaatgcctgaaggctctcttcaatcaccttccgctcaaccattccgccaccaattgtaccgacgatagaaccatcggcgcgcactaacatttgtgcagaatggcggggagtgctgcctcggctatcaacaatttgcgccatagcaaacggacaattttgctcttcgagttttgcagcctctgtgaaaatattcataccaacctcaatggatatcctttcagtaacccggaatacccgggccgttaattcacaaatctgcgcgcgattgcaggatgttcttgtatatcgcccagccagattgcctctacgtcgtgttgttgcagcggttgaaggagctcgctttgtgcaatcgcattctcacattgagaaaaacggttaatgaaccagactcgccgacaaccttgcggtacgtttttaaacgccccctgagggtggcgaaccagcgcaacgagatcgctcagttgcaaggttgcatcaggtgttaacccggtaatatcagcaaactggctccagcgatggacattttctgtgctcactttcgcgcccaaagtatgtcctcccatcacagcaatcacgcagcaactgcttttgggtatgcaaggttcgtgctcatcaggcgcttttaacggcattccacggctgccatctgcttcaatgagaattacgtcacactctggtcgttgcaccagtgcatcaatcgcttctggcgtaaatccctgcacttttccctggttcgctttccagctgtgaaaacaaaaactaatgggggatgtaagagacgcatgaggaagcatggcgggatcacgacagaaaaccacgggccagtgagacgttggcataaacatatgtgtcgtcgtcgtgattaacacacgcctgccgctagcctggagcagttctgccagccaaaaaagcaagctggttttccccccagcaccaacaacagaaatcacagtgggacgtttctgcgcacctaaatcaatgactaatgcgcttgggtcaactatacttttcacgagtctttatgacctctctgggataaattatccccaacttaatccatcaggaagtaacgcaattatcaggcgttattagcccctataaataatggaaccactatgagtgccatcgactgtataattaccgctgccggattaagtagtagaatggggcaatggaaaatgatgttaccctgggaacagggaacaattcttgatacaagtatcaaaaatgcgttgcagttttgtagccgaattattttagtcaccggctatcgtggtaatgaactgcacgaacgttatgcgaaccagagcaatatcactattattcacaacccagattatgcgcagggtttactaacatccgtcaaggccgcagtacccgcagtgcaaacagaacattgttttctcacccacggtgacatgccaaccctcaccatcgatatttttagaaaaatctggagcttacgaaatgatggcgcaatactgccactccataatggcatccccggccatccgattttagtgagtaaaccatgcctgatgcaggcaatccaacgacccaatgtcaccaatatgcgtcaggcactccttatgggagatcattattccgtcgaaatagaaaatgcagaaataattttagatattgatactccggacgactttattacagcgaaggaaaggtatactgaaatttaaaaaacgtagttaaacgattgcgttcaaatatttaatccttccggcactcattatcataatgataaggaatcactgattttgagaaaagagaaaaattgataaatgggctggcaataataattttcaggagtgattttaattctcatttagcacctgtgagttcattcacaaaaagcccttaagtttcgagccgcctcacatttttttatatttcccgccaaacctggcaagagtggtgcgattgttgctctatccccctaaaccaccggatttctcaacaccggtcactcaatgatatctgtataagctaaggagagggttatgggggatattatgcgtcccattccgtttgaggaacttttgacgcgcatatttgatgaataccaacaacaacgcagtatctttggtattcccgagcaacagttttacagtcctgtaaaaggtaaaactgttagcgtcttcggtgaaacctgtgccactcccgtcggccctgccgctggcccgcacacgcagctcgcgcaaaatattgtcacttcctggctgactggcggacgcttcatcgaactaaaaaccgtccaaattcttgaccgcctggagctggaaaagccctgtatcgatgccgaagacgagtgctttaacaccgaatggtctaccgagtttaccctgcttaaagcctgggatgaatacctcaaagcctggtttgccctgcaccttctcgaagcgatgttccagccttctgattccggtaaaagcttcatctttaatatgagcgtcggttacaacctcgaaggtattaagcaaccgccgatgcaacagttcatcgacaatatgatggacgcatctgaccatccgaaattcgctcaatatcgcgatacgctgaataaattactccaggatgacgcatttttagctcgccacggattgcaggaaaaacgcgaaagcttgcaagccttacccgctcgcatccccaccagtatggtgcatggcgtcaccctctccaccatgcacggctgtcctccgcatgaaatcgaagccatttgccgctacatgctggaagaaaaagggctcaacacctttgtgaaacttaacccgaccttactggggtacgcgcgtgttcgtgagatcctcgatgtctgcggtttcggttacataggcttaaaagaagagagttttgatcacgacctcaagctgacgcaagcactggaaatgctggaacgcctgatggcactggcaaaagaaaaaagtctcggctttggcgtaaaactgactaacactctcggcaccatcaacaataaaggcgcactgcctggtgaagagatgtatatgagtggccgtgcgctgttcccgctctccatcaatgttgcagcagttctctctcgcgcctttgacggcaaactgcccatttcttattccggtggtgccagtcagctgactatccgcgatatttttgatacaggtattcgccctattactatggcaaccgacctgctgaaacctggcggctatctgcgcttaagtgcctgcatgcgcgagctggaaggctccgacgcctggggacttgaccatgttgacgtcgaacgactgaacagactggcagcagatgcgttaaccatggaatacacccagaaacactggaagccagaagagcgtattgaagtggcagaagacctgccgctgaccgactgctacgttgccccctgtgttactgcctgcgctatcaagcaagatattccggaatacatccgtctgcttggcgaacaccgctatgccgacgcgctggaactcatctaccaacgcaacgctctgcccgccattaccggtcatatttgcgatcaccagtgccaatacaactgtacccgcctggattacgacagtgcgctgaatatccgcgaactgaaaaaagtcgcgctggaaaaaggttgggatgaatataagcaacgctggcacaaaccagccggttctggtagtcgccatccggttgccgtgattggtgcaggtccggcgggtctggcagcaggttacttccttgccagagcgggccatccggttacgctgtttgaacgcgaagccaatgcgggcggcgtggtgaaaaatatcattcctcagttccgtattcctgcagagttaattcagcacgatatcgattttgttgccgctcacggcgtgaaatttgagtatggctgcagtcccgatttaaccattgagcagttaaaaaatcagggcttccactatgttctgattgccaccggcactgataaaaatagcggtgtgaaactggcgggcgacaaccaaaatgtctggaaaagtctccccttcctgcgtgaatacaacaagggtacagcgctcaagctgggcaaacatgtggtcgttgtcggggcgggtaacaccgcaatggactgcgctcgtgcggcgttacgcgttccaggcgtagaaaaagcaacgatcgtttaccgtcgtagtctacaagagatgcccgcatggcgcgaagagtatgaagaagcgttgcacgacggcgtagagttccgtttcctgaataatccggaacgtttcgatgctgatggcaccttaaccttgcgcgttatgagccttggcgaaccggatgagaaaggtcgtcgtcgtccggttgaaaccaatgaaacagtaacactgcttgtagacagcctgatcaccgccattggtgaacagcaggatactgaagccctgaatgcgatgggcgtgccgctggacaaaaacggctggccagacgtcgaccataatggcgaaactcgtctgactgacgtctttatgatcggcgacgtacagcgcggaccatcctccattgtcgctgctgtcggaaccgcgcgtcgggcgaccgatgccatccttagtcgggaaaatatccgttcccaccagaacgataaatactggaacaacgtcaatccagcggaaatctatcaacgtaaaggcgatatctctatcacgctggtgaacagtgacgatcgtgacgcgtttgtcgcccaggaagccgctcgctgcctcgaatgtaactacgtttgcagcaagtgtgtggatgtctgcccgaaccgcgccaacgtctccattgcggtcccaggcttccagaaccgtttccagacgctgcacctcgacgcttactgtaacgaatgcggcaactgcgctcagttctgtccgtggaacggtaaaccgtacaaagacaaaatcaccgtcttcagcctggcgcaagactttgataacagcagcaacccaggcttccttgtggaagattgccgggtacgagtacgtctgaataaccaaagctgggtgttaaacatcgacagcaaaggtcagtttaacaacgtaccaccggagctgaacgatatgtgccgcatcatcagccatgtccaccagcatcatcattatctgctgggccgcgtggaggtgtaatcatgttgattctgaagaatgtcactgcggtacagctacacccggcaaaagtgcaggaaggcgttgatatcgccatcgaaaacgatgtgattgtcgctatcggcgatgccctgacgcaacgctaccccgacgccagcttcaaagagatgcatggccggattgtgatgccagggattgtctgcagccacaaccatttttacagcgggctttcccgcggaattatggcaaacatcgcccctttgcccggatttcatcagtacgctgaaaaatctctggtggcggctcgatcgcgcccttgatgaagagagcctctattacagcggactgatttgttccctggaagcgattaagagcggatgtacaagcgttatcgatcaccatgcctctccggcgtatatcggcgggagactctccacattgcgcgacgcatttttaaaagttggcctgcgcgcgatgacctgttttgaaactactgaccgtaacaacggcatcaaagagttgcaggaaggtgtagaagaaaacatccgtttcgcccgtttgattgatgaggcgaagaaagcgacaagcgagccgtatctggtggaagcacatatcggtgctcacgcgccgtttaccgtgccggatgccggtctggagatgctgcgtgaagccgtgaaagccacaggccgtggtttgcatattcacgctgcggaagacctttacgacgtttcctacagtcaccactggtacggcaaagacctgctggcacgactggcgcaattcgatctcatcgacagcaaaacgctggtcgctcatgggctgtacttgagcaaagatgacatcaccctactcaatcagcgcgatgcgttcctggtgcataacgcccgtagtaacatgaacaaccatgtcggctacaaccatcaccttagcgacatccgcaatctggcgttgggaacggacggcattggtagcgacatgtttgaagagatgaaatttgccttctttaaacatcgcgatgcgggtggtccgctgtggcctgacagttttgccaaagccctgactaacggtaacgaactgatgagccgcaactttggcgcgaaatttgggcttctggaagccggttacaaagctgatttaaccatttgcgattacaacagcccgacgccgctgctggcagacaatatcgccgggcatatcgctttcggtatgggcagtggcagcgttcacagcgtgatggtcaatggtgtgatggtctatgaagaccgtcagtttaacttcgattgcgattccatttatgcacaagccagaaaagccgctgccagtatgtggcgtcggatggatgcgctggcataaatgacagatgccctcttcccgcagggaagagggttaaataaggaaagaagatgattgaacaatttttcaggcccgactctgtcgaacaggcgctggaactgaagcgccgctaccaggatgaagccgtctggttcgccgggggcagcaaactcaatgctacaccaacccgtaccgataaaaagattgccatttccttacaggatctggaactggactgggttgactgggataacggtgcactgcggattggcgcaatgtctcgcttgcagccactgcgtgatgcgcgatttattcctgcagcgctgcgtgaagccctcggttttgtttacagtcgccatgttcgtaatcagagcaccattggtggtgaaatcgccgcccgccaggaagagagcgtgctgcttcccgtcctgttggcactggatgctgaactggtttttggcaacggcgaaacgctgagtatcgaggactacctggcctgcccatgcgatcgcctgctaaccgaaattatcattaaagatccgtatcgcacctgtgcgacccgcaaaattagccgttctcaggcaggtttaaccgtcgtgacggcagccgttgcaatgacagaccacgacggtatgcgaattgcgctggatggcgtcgccagtaaagcactgcgtctgcatgatgtcgaaaaacaaaatctggaaggcaatgcacttgaacaggctgtcgccaacgccattttcccgcaggaagatttgcggggcagcgtggcctataaacgctatatcacgggagttctggtagccgacctgtatgccgactgccaacaggctggggaggaagccgtatgatcatccactttactttaaatggcgcgcctcaggagctaaccgttaatccaggcgaaaacgtgcaaaagctgttgtttaacatgggaatgcactctgtacgcaacagtgatgatggtttcgggtttgccggttctgacgcaataatctttaacggtaatatcgttaacgcgtccttgcttattgccgcacagttagagaaggcagatattcgtaccgcagaatctctgggcaaatggaacgagttaagtctggttcaacaggcaatggttgatgttggcgtggtgcagtctggttataacgatccagctgcagctctgattatcaccgatcttctcgatcgcatcgccgcacctacccgcgaagagatcgacgacgcgctttctggtttgttcagccgcgatgctggctggcagcaatactatcaggtcattgaactggcggttgcacgtaaaaataatccgcaggccaccattgatatcgctccgactttccgtgacgacctagaagtcattggtaagcattatcctaaaactgatgccgcgaaaatggtgcaggcgaaaccctgctatgttgaagaccgcgtaacggctgacgcctgcgtcattaaaatgttacgtagcccacacgctcacgcactgattactcatctggatgtcagcaaagctgaagccttaccgggcgtcgttcacgttattactcacctgaattgcccggatatctactataccccgggtggtcagagcgcaccggaaccgagtccgcttgaccgccgtatgttcggcaagaaaatgcgtcacgtcggcgatcgtgttgctgcggtcgtcgcagaaagtgaagaaattgcgctcgaagcactgaagctcatcgacgttgaatatgaagtgcttaagccggtaatgagcatcgacgaagcaatggcggaagatgcgcctgtcgtgcacgatgaaccggtggtgtatgttgctggtgcgccagatactctggaagacgataacagccatgcagcccagcgcggcgagcatatgatcatcaacttcccgatcggttctcgccctcgcaaaaatatcgccgccagtattcatggtcatattggcgatatggacaaaggctttgccgatgccgatgtgatcattgagcgaacctataacagtacgcaagcgcagcagtgcccgactgaaacacatatctgctttactcgtatggacggcgatcgtctggttatccacgcctccacccaggtaccatggcacttacgccgccaggtcgcgcgcctcgtgggcatgaaacagcataaagttcatgtcattaaagagcgagttggcggcggttttggttccaaacaggacatcctgctggaagaagtgtgcgcctgggcaacctgcgtgaccgggcgtccggtactgttccgctacacccgtgaagaagagtttattgctaacacctctcgtcacgtcgcgaaagtcaccgtcaaactgggagcgaaaaaagatggtcgcctgacggcagtgaagatggatttccgcgccaacactggcccttacggcaaccacagtctcaccgtaccgtgtaacggaccggcgctgagcctgccgttatatccgtgcgataacgtcgatttccaggtcaccacctactacagcaacatttgcccaaatggtgcttatcagggttatggcgcaccgaaaggtaacttcgctatcaccatggcattagcggaactggctgaacagttacagatcgaccaactggaaattatcgaacgtaaccgggtacacgaagggcaagagctgaaaattctcggtgcaatcggtgaaggtaaagcgccgacctccgttccttccgccgccagctgtgcactggaagagatcctgcgtcagggtcgcgagatgatccaatggagcagtccgaaaccgcaaaatggtgactggcacatcggtcgcggcgtcgccattatcatgcagaaaagcggtatcccggatatcgatcaggctaactgcatgatcaaactggaaagcgacggcacctttatcgttcattctggcggtgcggatattggtactggtctggatactgtagtgacgaaactggcagcagaagtgctgcactgcccaccgcaggacgtgcatgttatctccggtgataccgatcatgcgttgtttgataaaggcgcatatgccagctccggtacttgcttcagcggtaacgcggcgcgtttggcagcggaaaatctacgggagaaaattctgttccacggcgcgcaaatgttgggtgagccagtggcagatgttcaactggcaacgccgggcgtcgtgcgcggcaagaaaggcgaagttagtttcggggatattgcccataaaggcgaaaccggcaccggctttggtagtctggtgggaactggcagttatatcacgcctgatttcgccttcccgtatggcgcaaacttcgctgaagttgccgtcaacacgcgtacgggtgaaatccgcctggataaattctacgccttgctggactgcggtacaccggtcaatccagagttagcgttgggacaaatctacggtgccaccctgcgtgctatcggccacagtatgagcgaagagatcatttatgacgccgaaggtcacccgttaacgcgtgatttacgcagttacggcgcaccgaaaattggtgacattccgcgtgatttccgcgctgtgctggtgccgagcgacgataaagtcggcccgttcggggcgaaaagcatcagcgaaatcggtgtaaatggcgcagctccggcgattgctaccgcaattcacgatgcatgcggcatctggttacgcgaatggcatttcacaccggagaaaatactcactgcgctggaaaaaatataaataataaatggccgcttcggcggcctgtttctctgtttgaacgatgactaaatagtgactgcgaaaatgagataagccgttctcaaggcgtcctgcgccccaaattcgtgggaatttattttactaattcagatgatcaaatttactttaaaaggagtgaagggatgtctgatataaaccatgcaggttctgaccttatatttgaactggaggatcgccctccctttcatcaggctctcgttggtgccattacccatctgttggcaattttcgttccgatggtaacccccgcgttaatcgtgggtgcggccttacagctttccgctgaaacaactgcctatcttgtttctatggcgatgatcgcctctggtattggtacctggttacaagtaaaccgctacggcatcgtcggttctggcctactcagtattcagagtgtcaattttagttttgttacggtcatgattgcgctgggcagcagcatgaaaagcgacggttttcacgaagagttaatcatgagcagccttctcggcgtctccttcgttggcgcatttctggttgtcggatctagttttatcttgccctatttacgtcgggttattacgcctaccgtcagcggtattgtggtactgatgatcggcttaagcctgattaaagtcggcattatcgattttggtggaggatttgcagccaaaagcagcggtacgttcggcaattacgaacatctcggcgttggtttattggttttaattgtggtgatcggctttaactgctgtcgcagtccgttgctacgcatgggagggatcgccattgggctatgtgtcggctatatcgcaagcttatgcctgggcatggtggatttcagcagtatgcgcaatttgccgttaatcaccatcccgcatccgttcaaatacggctttagttttagcttccatcagttcctggtggttggcacgatttatctgcttagcgtgctggaagcagtcggcgatatcaccgccacggcaatggtttcccgccgccccattcagggggaagagtatcagtcccggctgaaaggcggcgtgctggcagatggtctggtttctgttatcgcctccgctgtcggtagtttaccattaaccacgtttgcgcaaaataatggggttattcagatgactggcgtcgctagtcgttatgtcgggcgaaccatcgcggtaatgctggttatcctcggcttatttccgatgattggcggcttcttcacgaccattcccagcgcagttctgggaggcgcaatgacgttgatgttttccatgattgccatcgcagggattcgcatcatcatcaccaacggtttaaagcgccgtgaaacacttattgtcgccacttctttaggtttagggcttggcgtctcctacgatcccgaaatttttaaaatattgccagcctctatttatgtattagttgaaaaccctatttgtgctggcgggttaactgcgattttattaaatattatcctccctggtggctaccgacaggaaaacgttctgcctggtattaccagtgcggaagagatggattaacagtaaaggagtcaatgatgagtggagaacacacgttaaaagcggtacgaggcagttttattgatgtcacccgtacgatcgataacccggaagagattgcctctgcgctgcggtttattgaggatggtttattactcattaaacagggaaaagtggaatggtttggcgaatgggaaaacggaaagcatcaaattcctgacaccattcgcgtgcgcgactatcgcggcaaactgatagtaccgggctttgtcgatacacatatccattatccgcaaagtgaaatggtgggggcctatggtgagcaattgctggagtggttgaataaacacaccttccctactgaacgtcgttatgaggatttagagtacgcccgcgaaatgagcgcgttcttcatcaagcagcttttacgtaacggaaccaccacggcgctggtgtttggcactgttcatccgcaatctgttgatgcgctgtttgaagccgccagtcatatcaatatgcgtatgattgccggtaaggtgatgatggaccgcaacgcaccggattatctgctcgacactgccgaaagcagctatcaccaaagcaaagaactgatcgaacgctggcacaaaaatggtcgtctgctatatgcgattacgccacgcttcgccccgaccagttctcctgaacagatggcgatggcgcaacgcctgaaagaagaatatccggatacgtgggtacatacccatctctgtgaaaacaaagatgaaattgcctgggtgaaaagcctttatcctgaccatgatggttatctggatgtttaccatcagtacggcctgaccggtaaaaactgtgtctttgctcactgcgtccatctcgaagaaaaagagtgggatcgtctcagcgaaaccaaatccagcattgctttctgtccgacctccaacctttacctcggcagcggcttattcaacttgaaaaaagcatggcagaagaaagttaaagtgggcatgggaacggatatcggtgccggaaccactttcaacatgctgcaaacgctgaacgaagcctacaaagtattgcaattacaaggctatcgcctcagcgcatatgaagcgttttacctggccacgctcggcggagcgaaatctctgggccttgacgatttgattggcaactttttacctggcaaagaggctgatttcgtggtgatggaacccaccgccactccgctacagcagctgcgctatgacaactctgtttctttagtcgacaaattgttcgtgatgatgacgttgggcgatgaccgtagcatctaccgcacctacgttgatggtcgtctggtgtacgaacgcaactaataataaaactttaacatcctcgtgaggacatcattatgtctggagacatcctacaaacaccggacgcaccaaagccacagggcgcgctggataattattttaaaattaccgctcgtggcagtaccgttcgtcaggaagtactggctggcttaacgacctttctggccatggtttattccgttatcgtcgttccgggaatgctgggcaaagcaggttttcctcccgcagctgtgtttgttgccacctgtctggtcgcgggcttcggcagcttgctgatgggattatgggctaatttgccaatggcgattggttgcgcgatttccttgacggcgtttaccgcattcagtctggtactcgggcaacaaattagcgttcctgtcgcactgggcgcggtatttctgatgggcgtcatcttcaccgccatttccgtaaccggtgtgcgtacctggatcttacgtaatttgccgatgggtatcgctcacggtacaggtatcggtatcgggctgtttctgctgctgattgctgctaacggtgtgggtatggttatcaaaaacccgattgaaggcttgccagtggcgctcggtgcgtttacctccttcccggtgatgatgagcttgctggggctggcggtcatcttcggcctggagaagtgtcgcgtacccggcgggatcttgttggtgattattgcaattagcatcatcggcttaatctttgacccagcggtgaaataccacggtctggtggcgatgccaagcctgactggcgaagatggtaagtctctgattttcagcctcgatattatgggtgcactccagccaactgtacttccgagtgtactggcattggtgatgaccgcagtgttcgacgctactggcaccatccgtgccgtcgccggtcaggcgaatttgttggataaagacaaccagatcatcaacggcggcaaagccctgaccagtgacagtgtaagtagtatattctccggcctggtgggcgcagcgcccgcagcggtttatatcgaaagtgcggcaggaaccgccgccgggggtaaaacaggtttaaccgcaaccgtagtgggggcgttattcctgttaattctgtttttaagtccgctgagttttttgatccctggttacgccactgcacccgctctgatgtacgtaggtttgctgatgttaagtaacgtcagcaagctggatttcaatgattttattgacgctatggctggcctggtgtgtgccgtgttcatcgttctgacttgtaatatcgttaccggtattatgctgggctttgtgacactggtcgtaggccgcgtctttgcacgcgaatggcaaaagctgaatattggtacggtgatcattactgccgcactggtcgcattttacgcgggtggttgggcaatctaatagattctccgcgcctttcagcgcggagatttctttcagagaggattctcaccgctggcaacaatacgctgctggcggactcgcctgagttctctttcagtaagcaactgcagcgcctgtgttgggcaagattcaacgcaggctggcccctcttcccgctgttcacagagatcgcatttcacaatttgttgtcgggtatcccccggcaagctctgaatggtgatcattccaaacgggcacgcactgacgcaactctgacagccaatacaacgggcagaattggtctgcaccacctgctcgcccatcgtcagcgcccccacggggcaagcgccaacacaaggggcgttttcacactgatggcacatcaccggcgcactgatgctgtccagtcgctgtaccttcagccggggtaaaaagacatcggcattcaactcctgttcactagggtgagcgaccacacaggctacttcacaagtacggcagccaatacagtcagccggattaacgataattaagcttttcatcagcttgccttcgtatcaaacagagttaacatatcgcgcgccgcctgccttcctgcggccattgcagtgacaaccagatccgcgccatgaactgcatcaccaccagcaaagacttttttcagatgcgtctgggtaggtaaatacccgacgtcaccggtttgaatcaggccccatttatcgagtttaattccgctgccctgcaaccacggcatggcatgcgcctggaaaccaaaggccataatcagaacatcggcgggcaattcaaactcactacccgctaccggacgaggacgacggcgaccatccggccccggctcacccatggcggtacgaatcaggcccaccgcagttaaacgcccatcttcgtcacaagcgatatattgcggttgaacattgaactgaaactcgacaccttcctcgcgcgcattaaccacctctttgcggctgcccggcatactgacttcatcacgacgatacgcgcaggtcacgctggcggcattgaggcggatggaagtccgcaaacaatccattgtcgtatcgccaccgcccaataccacgactcgcttaccttccacgtccgtcagcggatactcttcagactccggcaatcccatgagctggcgggtatgggcagtcaggaacggtagagcctgaatgacaccgggcgcatcttcatgcggcagatctgctcgcatcatcccgtaagtccccacgccgatgaaaactgcatcatattcagaagttaaatcgctaaaggtaatatcgcggccaatttcacagttaagatgaaagtcgattcccattgcggtgaatatctctcgccgctggcttaataccgttttatcgagtttgaaaggaggaatgccaaaagtcagcataccgccaatttctggatggcgatcaaagacatcgacctgaactcctgcgcgcgccagaatatcagcacaccctaaccctgcaggcccagcgccaatcaccgccactttttcgctacggggaacaactttgctgacatcgggacgccaacccatcgccagcgcggtatcggtgatgtagcgttccagattaccgatagagactgcgccgctgtgatctttcaaagtacatgcgccttcacaaagacggtcctgtggacataccctgccgcaaatttctggtaaggaactggtctggtggcaaagttctgccgcttcaataatctttccttcctgtaccagacggatgtaatccggaatagcgttatgcagcgggcaatgccagttgcagttagctttttcggcacaataaacacagcggtcactctcataagtcgcttgttgtggatccagcccgcaatatatttcgccaaagtgggttttccgttcactcgcactaattttatctgcgcctttacggctgttaacggggagcaacgctgcactgcgagatggctgagcgtcactactcgcttttcctgctgccgttttgcgctggcgggccacctttatctgctgcaaccctttatcgtccatcagtcgtaacgcctgtgttgggcaaacttcaatacaggcttgcgtgccggaactgcgctggttacaaaggtcgcatttctgcgcaatcgtatcgaccatctcaacgacgccaaaggggcaagcgattgcgcatcttttacaaccaatacatttttgctcgtccagttgtacgctatcggactggaaagtcagagcattaaccggacaagccgtaacgcaaggggcattgttgcagtgatggcaggccaccggattcgcagcctggcctttccctacaacgtggatacgcggtcgaaagtcactgtgactcagcggccagttttcttgattgtgtgccaccgcacaggcaatttcacaagcatgacagcctatacattccgcagcttcagcagcaataaacttattcatttgcatccctttcatttaatgagttatgtcttctcaaatttcgcgatgcaataaacgggcatatattaggtagcatgaccgttttaattataattttgcgactgagttcaaattattgcccctcaatctatgccgctttcattatttcaacattgccgatcaaaagagcgctatccagataaaaacgattaaatgcgagagtgcgacatgccagaatgattaatgaaatatcaatatgagaaaattacagataattccattgtcaggttctcttctcattttcgtggtttaaccacgattatgtgattgcctccgcaattcctgtctctaactccccttcctcgcaaaaactggcactccacgagcatgtgtttagacagtttcattaacgtaaacggttgctttttactctggcgggcgaaaggagaaacactgatgagcgccatagattcccaacttcccagttcttctgggcaagaccgcccaactgatgaggttgaccgcatattaagtccaggaaagctgatcatactcggtctgcaacacgtccttgtcatgtacgcaggtgcagtcgctgttcctcttatgattggtgaccgactgggcctcagtaaagaagctattgcgatgctcattagcagcgatctcttttgctgcgggatcgtcacattattgcaatgtatcggtatcggccgctttatggggatccgcctgccggtgattatgagcgtgacctttgctgctgtaacaccaatgatagccattgggatgaacccggatatcggcctgctggggatatttggtgccactatcgccgcgggttttatcaccacattattagcgccacttatcggtcgcttgatgcctttattcccgccactggttaccggtgtggttattacttctatcgggcttagcatcattcaggtgggtattgactgggccgccggaggtaaagggaatccgcaatatggtaatcccgtttatttaggtatctcctttgccgtcttaatttttatcttgctcattactcgctatgcgaaaggatttatgtccaacgtcgccgtattactggggattgtatttggctttttacttagctggatgatgaatgaagtcaatttatccgggctacatgatgctagttggtttgcgattgttacgccgatgagctttggtatgccgattttcgatcccgtttccattctgaccatgactgccgtgttaatcatcgtgtttatcgagagtatggggatgttcctggcactgggtgaaatagtcggtcgtaaactctctagccacgatattattcgcgggctgcgtgtcgatggcgtagggacaatgataggcggcacgtttaacagcttcccccacacgagtttttctcaaaacgttggcctggttagcgtgacgcgcgttcatagccgctgggtgtgtatttctagcggaattatattaatcctgtttggcatggtgccaaaaatggcggtgctggtagcctccattccgcaatttgtgctgggcggcgctggtctagtgatgttcggcatggtactggcgacagggattcgaattctgagccgctgtaactacaccaccaaccgttacaacctctatattgtggcgatcagtctcggcgttggcatgactccgacgctctctcacgatttcttttctaagttaccggccgtactgcaaccgctgctacatagcggcattatgctcgcaacccttagcgccgttgtgctgaacgtcttctttaatggctatcagcatcatgctgacctggtgaaggaatccgtctctgataaagatttaaaagtcaggacagtacgtatgtggcttctgatgcgcaagctgaagaaaaatgagcatggagaataatatgaattttttaatgcgcgctatattcagtctgttgttgctttttactctctctattcctgtcatttctgactgtgttgcaatggccattgaaagtcgcttcaaatatatgatgctacttttttaaatggtttttacctgtcggcatccgctcaaaacgggcggttgtcgataaacgctcacttggttaatcatttcactcttcaattatctataatgatgagtgatcagaattacatgtgagaaattatgcaaacggaacacgtcattttattgaatgcacagggagttcccacgggtacgctggaaaagtatgccgcacacacggcagacacccgcttacatctcgcgttctccagttggctgtttaatgccaaaggacaattattagttacccgccgcgcactgagcaaaaaagcatggcctggcgtgtggactaacagcgtttgtgggcacccacaactgggagaaagcaacgaagacgcagtgatccgccgttgccgttatgagcttggcgtggaaattacgcctcctgaatctatctatcctgactttcgctaccgcgccaccgatccgagtggcattgtggaaaatgaagtgtgtccggtatttgccgcacgcaccactagtgcgttacagatcaatgatgatgaagtgatggattatcaatggtgtgatttagcagatgtattacacggtattgatgccacgccgtgggcgttcagtccgtggatggtgatgcaggcgacaaatcgcgaagccagaaaacgattatctgcatttacccagcttaaataaaaaaaccccgacatttgccggggttgtgagcataacgtaatgcttattttaccggacgcatcgccgggaacagaataacgtcgcggatggtatggctgttggtgaacagcattaccatacggtcgataccaattcccagacctgctgtcggcggtaagccatgttccagtgcggtgacgtaatcttcatcgtagaacatcgcttcgtcgtcacctgcgtctttcgcggcaacctgatccaggaagcgttgcgcctgatcttccgcgtcattcagctcgctaaagccgttaccgatttcacgaccaccaatgaagaactcaaagcggtctgtgatttccgggttaacgtcgttacgacgcgccagcggagaaacttctgccggatattcagtaatgaaggtcggctgaatcagatgtgcttctgccacttcttcgaagatctcggtaacgatacggcccagaccccagctcttctcaacgtggatgccgatagattcagcaattgctttcgcagagtcgaagttgtccagatccgccatgtcggtttccgggcgatatttcttgatcgcttcacgcatggtcagtttttcgaacggtttaccgaagtccagcgtcacgtcgccgtaggtcacttccgtcttaccgagaatatcctgtgccagagtacggaacaggctttcggtcagctcgatcagatctttgtaatctgcgtaagccatgtagagttccatcatggtgaactctgggttatgacgtacggaaataccttcgttacggaagttacggttgatttcgaatacacgctcgaagccaccaaccaccagacgcttgaggtacagttccggcgcgatacgcaggtacatgtcgagatccagcgcgttatggtgggtgataaacggacgcgcagcggcaccgccagggatcacctgcatcatcggcgtttcaacttccataaagccgcggttcaccatgaactggcgaataccagagaggatctggctgcgcactttaaaggtgttgcgggattcatcgttggagatgagatcgagataacgctgacgatagcgcgcttcctgatcctgcaagccgtggaatttatccggcagcggacgcagtgctttggtcagcagacgcaactcggtgcagtggatagacagttcgccggttttggttttgaacagcttacctttcgcgccgaggatgtcgccgaggtcccattttttgaactgctcgttataaacgccttccgggagatcgtcacgggcaacgtacagctgaatgcgaccgccaacgtcctgcagggtaacgaaagacgctttacccataatacgacgggtcatcatgcggccagcaacggcgacttcgatgttcagcgcttccagttcttcgttctctttgccgtcgaattctgcgtgcaattggtcagaggtatgatcgcgacggaaatcgttcgggaaggcaatcccctgctcgcgcaggttcgccagcttctcacgacgcgttttcagttcattgttaagatcgactaccgcgtcagcgccctgtgcgtgttgttcagacatgttggttcctcataaccctgctttcaaacttgcttcgataaattgatccaggctgccgtccagcacggcctgcgtgttgcgggtttctaccccggtgcgcagatctttaatgcgggagtcatcaaggacataagaacgaatctggctgccccagccgatgtcggatttgttatcttccatcgcctgtttctcggcatttttcttctgcatctccagttcataaagcttcgctttcatctgcttcatggcctgatctttgttcttgtgctgggaacggtcgttctggcactgggtcacgatcccggtcgggatgtgggtaatacgcaccgcagattcggtacggttaacgtgctgaccgcccgcgccggacgtgcgataaacgtcaatgcgcagatccgccgggttgatttcgatatcaatatcatcatcaacttccggataaacaaacgcggagctgaagctcgtgtggcgacgaccgccggagtcaaacgggcttttacgcaccaggcggtgaacgccggtttctgtacgcagccagccgtaagcgtaatcgccggagattttgatcgtcacggatttaatacccgccacttcaccttcgctctcttcgatgatttcagttttgaaaccacggctttctgcccagcgcagatacatacgctcaagcatgctcgcccagtcctgtgcttccgtaccgccagaccccgcctgaatatcgaggtagcagtcggcgctgtcatattcgccagagaacatacggcggaactcaagctgcgccagtttttcttccagggcgtcgagttcagcaacggcttcgttaaaggtttcttcgtcgtcagcttctacagccagttccagcagaccagaaacatcttccagcccctgtttcatttggtcgagggtgtcgacaacggcttcgagggaggaacgctctttacccagcgcctgtgcgcgttcgggttcgttccagacatccggctgttccagctcggcgtttacttcttccagacgctctttcttggcgtcgtagtcaaagataccccctaagaacgtcggagcgttccgtgaggtcctgaatgcgattatttaccggattaatttcaaacatggtctgatttcttttattgagctagtcaaaatgcggtgataagagcgggattgtacccaatccacgctcttttttatagagaagatgacgttaaattggccagatattgtcgatgataatttgcaggctgcggttgccgcgaaactcgttgatatcgagcttataagccagttgcacttcgcgcacgccgttatccggccagagggcggtatcgacattaaaagcaataccatccagcagtggaccgccgccgaccggttcgaccatcaccttcaaatgacgttcgcccaccagccgctgttgcagcagacggaaatgaccgtcaaacagcggctccgggaacatctgcccccacgggccagcatcgcgcagcagctgcgccacttccatggtcatttcggccgggcttaacggaccgtcacttaccacttcgccttgcaataggctagggtccagccactcagtaaccagttcgccaaaccgttgttgaaagagtttgaatttatcctcttccaggctcaaacccgccgccatcgcatgaccgccaaacttcagcatcatgccagggtagagtgtgtctaatcgctccagcgcatcacgcatatgcagcccctgaatggagcgaccggaacctttcagcgtaccgtcacctgctggcgcaaacgcgataaccggacggtgaaaacgctctttgatgcggctagccagaataccgacaacgccctgatgccattcggggtgatacattgccagcccgccgggtagcgtgtcacggctgcgctccagtttctcgcacagggtcagggcttcaatttgcattccttgttcgatctcttttcgcgtctggtttagcgcatcgagttcatttgccagcacgcgcgcttcgccgatgttgtcgcacaacaacagcgccacaccgacggacatatcgtccagtcgtccggcagcattgagacgtggccccagcgcaaaacctaaatcgctggcggcgagtttttgtgcatcacggtttgccacttcaagcagcgctttaatccccggacggcactttccggctcggatgcgactcatcccctgccaggtcagaatgcgattattagcgtccagcggcacgacgtccgccactgtccccagcgcgaccagatccagcagttctgccaggttaggaattgcgatgttacgctcatcaaaccagccctgatcgcgcaaaaaggtgcgcagcgccagcatcagataaaacgccacacccacgcctgccagacttttgctcgggaaattacagtcgcgcaagttagggttaatgatcgcttccgctgcgggtaatgtgtcgcctggcaaatggtgatcggtaacaataaccgggatgcccaagctgcgagcgtgctcaacccccgcatgggaggaaataccgttatccaccgtgacaattaactgcgcgccacgggcatgggcctgatcgaccacttccgggcttaagccgtaaccgtcttcgaaacggtttggtaccaggtagtcgatattgctgcaaccaaggctgcgcatcgccagcacgcttagagccgtgctggtcgcgccgtcggcgtcgaaatcaccgaccacaataatccgcgttccttcgcgaaaagcgttgtaaaggatctcaacggccttttcgacgccgctcagttgctgccagggcagcatacctttaacactgcgttccagttcttgcgcactgcgtactccccggctggcgtataaacggcgcagcaagggaggcaattcagcgggcaagtctgccgtttcatcgacttcacggcgacgaagttgtatctgttgtttcacgcgaattatttaccgctggtcattttttggtgttcgtcgaggaattctttcatctctttcggcggctggtaacccggaacaagtgtgccattgctcagcacaactgccggagtaccgctaacgccaagctggacgccaagtgcgtaatggtcggcaatatccacgtcgcaactggctggtgcgacgcttttacctgccatcacatcatcaaacgctttgtttttatctttcgcacaccagatagctttcatttctttctctgcatcgctgtccagcccctggcgcgggaaagcaagataacgcacggtgatccccagcgcgttgtagtctgccatttgctcatgcagtttgtggcagtaaccacaggtaatatcagtaaacacggtgatgacgtgtttttcctgcggcgctttataaacgatcatctctttttcaagcgcattcaactgctttaacagcatcttattggtgacattgaccggagccgtgccactaacgtcatacattggcccctgaatgatatgtttaccatcatcggtgatgtacaacacgccgctgttagtcagaactgtcttcatgccagctacaggcgcgggctgaatatcgctgcttttgatgcccattttggctaacgtttgttgaattgccgcgtcatcagcctgagcaaagccactaaacgccgctaacaaagtaaacaacataaaacctttcttcataaatcttcccgttcttttcagacatcacgcccgcgggtgatgctgttgatgaagttgccgcagacgctcggtagcgacatgcgtataaatttgcgtggtggagagatcgctgtggcccagtagcatctgcaccacgcgtaaatccgcaccatgatttaataaatgagtggcaaaagcgtgacgcaacacatgcggactcagcttttcgctgtcgatacccgccagcacagcataatgtttaatacggtgccagaaggtctgtcgcgtcatctgctgcgcacgctggctgggaaacaacacgtcaatactcacaccattcagcagccacggacgcccatgttccagataggtttccagccagtaaaccgcctcttcacctaacggcaccagacgctctttgttgcctttaccaatgacccgtaccacgccctgacgcaggctgatatcactcattgtcagtccgaccagttcagagacacgcagcccggtagcatacaacacttcaagcatggctttatcgcgtagctccagtggctgatcgattaatggtgcctgtaataaacgttcgacctgcgcttcgcttaaatcttttggcaaacgctggggcaatttcggactagcgagatgcgcactgggatcgtcttcacgaaacttttcgcgataaagatactggaacaatcggcgcactgcactcagcaaacgcgcactgctggtggctttatacccgccctccagccgttctgccagtaatgcctgcaaatcgtcactttgcgccgtcgccagcgtcaacccgcggtgatgcaaccactccaccatcatactcagatcgcgacggtaagcgttcaacgtattttcagccagatttttttccagccacagagcatcaagaaactgctcgatgcgtgccagatcctgtttcacttgcgccccttatggtcactcatttgatccattatgccttattgtgccgtgactaaagcgattctgatacactagccgcaaaagccacagcagaatcgagaagcttacgttatgaatatgggtcttttttacggttccagcacctgttacaccgaaatggcggcagaaaaaatccgcgatattatcggcccagaactggtgaccttacataacctcaaggacgactccccgaaattaatggagcagtacgatgtgctcattctgggtatcccgacctgggattttggtgaaatccaggaagactgggaagccgtctgggatcagctcgacgacctgaaccttgaaggtaaaattgttgcgctgtatgggcttggcgatcaactgggatacggcgagtggttcctcgatgcgctcggtatgctgcatgacaaactcagcaccaaaggcgtgaagttcgtcggctactggccaacggaaggatatgaatttaccagcccgaaaccggtgattgctgacgggcaactgttcgtgggtctggcgctggatgaaactaaccagtatgaccttagcgacgagcgtattcagagctggtgcgagcaaatcctcaacgaaatggcagagcattacgcctgatctcactgacggcttagcgcatatgctttgccgtcatctttatctttgcgtctcttgttgcaacaaaatccgccgtaaatcccgccattcagcttcgtccatgctgtcggctgccagccataaatgttgccgtttaccgccatcagaacgtaaacgcagcatcatgccgctcttaatcatccacggtgctttgacgatgctccactcctgcccttgccaacgcaaacgcccgtccatcaacaagcgaatttccccctggcgagcattaatacgccgctggctgcgaacgcaatcaaacaccaccaggctaagtaacaccatccataacggggtgtaactgagtggccagggcatgagtaaaataacagcggcaaccagcccatgaatcagcaaggaaagccactgtgcgcgccaggagacgcgcaaatcagattgccacaggaccacgttcccggttccgtgtctggatgagtcggaccatcatttccagttctgcatcggccggtttaccgtgattcatcagccagttaaacaggtccggatcgtcacattccagcagacgaataaagatgcgtttttcgtcatcgcttaagctgtcgtactcatgttcgaaaaacggcatgatactaatatcgagttcgcgcataccacggcggcatgcccaatgaatgcgggctttgttgttaatgtccatcttcttcctgtctcacgaaaatccagtacccggctattgtaacgtgtttttcgccttcttttacgggaatatcagtaaacaccatcgcgatcgcgaaattaattcacaacaattcaatggcttcatttttttggaagtcgcctcgcagaaggcacagatcgcgtagtgaaagcacttgcattgcctcatagctcttttaccattagtcattaatacgccgttaagcaactcaggactctattatggcttttacaccttttcctccccgtcagcctacggcttctgcccgtttaccgctgacgctgatgacgcttgatgactgggcgcttgccaccattactggcgcggacagcgaaaaatatatgcagggtcaggtgacagcagatgtcagccagatggcagaagatcagcacctgctcgccgcccattgcgacgccaaaggtaaaatgtggagcaatttacgtctgttccgcgacggcgatggctttgcatggattgaacggcgcagcgtgcgtgaaccgcagctgactgaactgaaaaaatatgcggtattctctaaagtgaccatcgcgccagacgacgagcgtgtgctgcttggtgttgccggttttcaggcgcgcgccgcgctggcaaatctctttagcgaactgcctagcaaagaaaaacaggtagtcaaagaaggcgcgaccactttgctatggtttgaacacccggcagaacgtttcctgatcgtaaccgatgaagctactgctaatatgctgaccgataaactgcgcggtgaagcggaactgaacaatagccaacagtggctggcattaaacattgaagcgggtttcccggtgattgatgccgccaacagcgggcagtttatcccacaggcgaccaatctccaggcgctgggcggtatcagctttaagaaaggctgttataccggacaagagatggtggcgcgagcaaaattccgtggtgccaataaacgtgcgctctggttgctggcaggtagcgccagccgactgccggaagctggtgaagacttagagctgaaaatgggcgagaactggcgtcgtaccggtacggtactggctgcggtaaaactggaagatggtcaggtcgtggtacaggtcgtcatgaataacgatatggaaccggatagcatcttccgcgtacgcgacgatgcgaatacattgcatatcgagccgctgccgtatagcctcgaagagtaaatctctttatcgcatcaggcatttatcgcctgatgcgacgctggcgcgtcttatcatgtctgggatttgatgcctttatcacaacagggacgaggcccgtagatcggataaggcgttcacgccgaatccggcagttgtgctccgatgcctgatgcgacgctggcgcgtcttatcaggcctacaaaggcatacccattacgcctgcccaatatacaaatagatcgccagaaagtggcacacactaccgccgagcacgaagccgtgccagatggcatggttgtatggaatgcgtttgcagacgtagaaaatcaccccgaggctataaaccacgccgcctaccgccagtaaggtaacgctgcccgccgcgagcttaactgccatttcataaattaccaccaggctcagccagcccatcgccagataggtcaccagagataaaattttgaatcggtgcgcgatggtcagtttaaacagaatacccagcaatgccaggctccagataacaatcatcaacccgcgcgctaacggagaatccagccccaccagcaaaaacggcgtgtaggttccggcaatcaacaggtaaatagcgcaatggtcaaatttcttcagccacatttttgcccgttgatgaggaatggcgtgatagagcgtgctagcgaggaacagcaggatcatactgccgccatagaggctgtagctggttatcgctgtggcgctggcattaagatccaccgcctgaaccagtagcaacaccagcccaacgataccaaacaccaacccaatgccgtgactgacgctgttggctatttcctctgccagactatatccctgcttaatgaggggcttctgaaccataacttactccggagaaacgtacacgcacatgtatacctctccagcgtaactgagaatagttccagtgaacacctgttagctaaaataaattctgatttgagactaatctcctaaaaatcatgaaattaaatgcgaaatttcaactaacaggcgtgagttcaatttaaagacatttaaattcaatcacataaaattgtgtctgaccgggatagatgtcagcaatgacttttttcagttcagtcagggtcatattttcctgctctgcatgtttttcagtcagcgtatccagcgttacggtactggttgcggtgacttcaatcgtgcaaaaataaccgtcatcttcaaaacgtccgacacgaagcacatcacccgttttgaagtggctttcagactcgtcgcggatggtgatggttttacgcccagccagaatgtcatcctggaaacgttgaaaaaaagtgatgtcgtttggctgcatggtactatttcctgtaagaattgactcatctggagcctatgatagtgaaaaaactcaccttaccgaaagatttcttatggggcggcgcagttgccgctcatcaggtcgaaggcggctggaacaaaggcggaaaagggccgagcatttgtgacgttctgaccggtggcgcacacggcgtgccgcgcgaaatcaccaaagaagtcttgccaggaaaatactatccaaaccatgaagccgttgatttttatggtcactataaggaagacatcaagctatttgccgaaatgggcttcaaatgttttcgtacatccattgcctggacgcgcatttttccaaaaggcgatgaagctcagccaaacgaagaagggctgaagttctacgatgatatgttcgatgaactgctgaaatacaacatcgaaccggtgatcaccctctcccactttgaaatgccgctgcatctggtgcagcaatacggtagctggaccaaccgtaaagtggttgatttctttgtacgtttcgcggaagtggtatttgaacgctataagcacaaagtcaaatactggatgaccttcaacgaaattaacaaccagcgtaactggcgtgcaccgctgttcggttactgctgctccggcgtggtgtataccgagcatgaaaacccggaagagacgatgtatcaggtgctgcatcaccagtttgtcgccagcgccctggcggtgaaagctgcgcgtcgcattaacccggagatgaaagtcggctgtatgctggcgatggtgccgctctatccttactcctgtaacccggacgatgtgatgttcgctcaggagagcatgcgcgaacgctacgtctttaccgatgtgcagctacgcggctattacccgtcctatgtgttgaacgagtgggagcgtcgcggatttaacatcaaaatggaagacggcgatctggatgtgctgcgtgaaggcacctgcgattatcttggtttcagctattacatgaccaatgcagtgaaggccgaaggcggcaccggcgatgcgatctctggttttgaaggcagcgtaccaaacccgtatgttaaagcatctgactggggctggcagattgatccagtaggtctgcgctatgcactttgcgaactgtatgagcgttatcagaggccgctgtttattgtcgaaaacggttttggcgcttacgacaaagtggaagaagatggcagcatcaacgacgactaccgcattgactacctgcgcgcccatatcgaagagatgaaaaaagcggtgacttacgatggcgtggatctgatgggctacacaccgtggggctgcatcgactgcgtgagcttcaccaccgggcagtacagcaaacgctacggctttatctatgtgaataaacatgacgacggtactggcgatatgagccgtagtcgtaagaagagctttaactggtacaaagaggtgattgccagcaacggcgagaagctttaagtcgatgaagtaccggatgcaatacttgttgcatccggtcagacaacttccctgttttatttcccgcccgccaaatcgataaaacttcccgtgacgtaagaggctttatcacttagtagccagacaatggcctgcgcgacctcttctgcctgtccaccacgctgcatggggatgttgctcttaacgcgatcgacgcgtccaggctcgccgccgctggcgtgcatttcggtataaataaaccctggccgcacgcagttaacgcggatcccctgcgcggcgacttccaggcttagtccggtggttaacgtatcaatcgcccctttgcttgccgcgtaatcaacatattcccctgggctacccaaccgactggccacgctagagacattgacgatagcgccgccactgccaccatttttaagcgccatgcgttttaccgcctcgcggcagcagagaaaatatcccgtcacgttggtggaaagtactcggttgattcgctctgcggtaaggttttcaacggtgcactgggtaaacaagatcccggcgttattgaccagcgctgctagcggttcatcgtgctgatcgattgctgtaaacatcgcaacgacctggttttcgtcgctgatatccgcctggagcacgaatgctttgccaccggcttgcgttattaagttcatcacttcctgcgccgcgtggaggttttgctgataattaaccgccaccgtatacccttcttgcgccaacagtaatgcagttgcccgcccgatgccgcgactgccaccagtcacaagtgctatagccatttgtttttccgagaaaaattaattcgttgacgtatctttgagattgctaacaaactggctcaatcttcaatgttggcacgcttttccccctcgccctttcagggagagggccggggtgagggtaaatattcgcgccagtgccggcctgttcccctcaccctaaccctctccccaaaggggcgaggggactgtctgagcacttttgtactttgtcatctgactaaaaaggcgccgaagcgcctttagaaaatagtcgaatcagtgaattactggtattcgctaatcggtacgcaggagcagaacaggttacggtcgccgtaaacatcatccagacgtttcactgtcggccagtatttgtctgccacacctgccgggaataccgcaacttcacggctgtacggatgcgcccactcggcgaccagttcgctctgaatgtgcggcgcgttcaccagcgggttatcttccagcggccagacaccggctttcacctggtcaatttctgcgcggatagccagcatcgcgtcgataaagcgatccagttccactttgctttcagattcagtcggttcaaccatcagcgtacccgccaccgggaagctcatcgtcggcgcgtggaaaccgtagtcgatcaggcgcttggcaatatccagctcgctgatgccggtttcttctttcagcgggcgaatatcgagaatacattcgtgcgccacgcgaccgtcgcgaccggtatacagcaccgggaaggcatcctgcaggcggctggcaatatagttggcgttgaggattgccacctggcttgcttttttcagcccttctgcgcccatcatgcggatgtacatccagctgattggcaggatagaggcgctaccgaacggtgccgcagaaaccgcgccctgacgggttaacatgccttcgatttgcaccacgctatgacccggtacaaacggtgccaaatgcgctttcacgccgatcggtcccatacccggaccaccaccgccgtgcggaatgcagaaagttttatgtaggttaaggtgactaacgtccgcaccaataaagcccgggctggtgatgccaacctgggcgttcatgttcgcgccatcaaggtaaacctgaccgccgaactgatgcacgacttcacacacttcacggatcgtttcttcatacacgccgtgggtagaaggataagtcaccatgatacaggagaggttatcgcccgcctgttccgctttcgcgcgcagatcagtcagatcgatgttgccgtttttatcacacgccacaaccaccacctgcattcctgccatatgtgcagaagcggggttagttccgtgcgcagaagccgggatcaggcagatatcgcgatgcccttcgttgcggctttcatgataatgacgaatcgccagcaggcccgcgtattcgccctgtgcgccagagttcggctgcatacaaacggcgtcgtaaccggtcagtttcaccagccagtcagccagctgcgcaatcatctgctgataaccttcggcctgctccggcgggcagaacgggtgcagttcggcaaattccggccaggtgattgggatcatctcggcggcggcgttcagtttcatggtgcaggaacccagcgggatcatcgcctgattcagcgccagatctttacgctccaggctgtgcatatagcgcatcatttcggtttcgctgtggtagcgattaaacaccggatgggtgaggatttcgtcgtcgcgcagcatcgcaggctggatagagcggctgtcgtgagccacgtctttgtccagcgtgtcgatgtccaggccgtggttatcgcccagcagcacgttgaaaagctgcattacgttttcacgcgtggttgtttcatcaagggtgatcccaaccgcgttcagaatatcgctacgcaggttgatttcagccgcttcggcacgcgtcagtacgcccgctttgtcggccacttccacacacaaggtgtcgaaatagtgcgcatggcgcagtttcagacctttttgttgcaggcccgccgccaggatatcggtcagacggtgaatgcggttagcgatacgtttcaggccaaccgggccgtgataaacggcatacaggctggcgatgtttgccagcagtacctgggaagtacaaatgttggagttcgctttctcacggcggatatgttgctcgcgagtctgcatcgccatgcgcagcgcggtattgccagctgcatctttgcttacaccgataatacggcccggcatactgcgtttgtattcatctttcgccgcaaagaatgccgcgtgtgggccaccgtagcccatcggcacgccgaagcgttgcgcgctaccaaaaacaatatccgcgccctgtttacccggcgcagttaacagcaccagcgccataatatcggcggcaacgctgaccacaattttgcgacttttcagttcgctaataagcgcagtgtagtcgtgaatttcaccggtagtgcctacctgctgtaacagcacgccgaagacgtcctgatggtcgagcactttttgcgcgtcatcgacaatcacttcaaaaccaaaggtttcggcacgagtacggaccacatccagcgtttgcggatgcacatcggaagccacgaagaagcggttggcatttttcagtttgctgacgcgtttcgccatcgccattgcttcggcggcagcggtggcctcgtccagaagagaagcagaggccatatccagtccagtcaaatccagcgttacctgctggaagttgagcagtgcttcaaggcggccctgggagacttcaggttgatacggagtgtacgcggtataccagcccggattttccagcatgttacgcaggataaccggcggtagctgcacggcggtgtaacccatgccgatgtaagacgtgaagcgtttattgcgactggcaatagccttgagttctgccagtgcggcgtattcggtcgccggtgcgccaacctgcggtggtgtcgcaagttgaatatctttcggcacaatctggccggtcagcgcgtttaagctttgtgcaccaacggcattcagcatttcttgctgttgcgcggcgtccggtccgatatggcgttcaataaaagcgccgctgttttcaagctggcttaacgtctgtgtcatgagcgatggttcctgaaacgtgcagtgaattgtgaacctctctccttacgaagagagtgagggtgaggcataaattttcctcaccctgatcctctcccgcagaagaggaataaagccgttactcgtcttctaacaatgcttcgtatgcggtcgcatccagcagactttccagttcgctttcatcgctggctttgattttaaagatccagccgcctgcatacggttcgctgttcaccagttccggggaatcgctcagtgcgtcgtttaccgccacgatttcaccgcttactggcgcataaatgtcactcgccgcttttacgctttcggcaaccgcgcagtcatcgcccgcgctaaccgttgcgcccacttccggcaggtcaacaaacaccatatcgcctaacagctcctgagcatgttcggtaataccaacggtgtaagtgccgtcggcttctttacgcagccattcgtgttctttgctgtatttcagttctgctggtacgttgctcatcaatcaatctccaaaaaagtaaatcacgcgacggctttgccgttacgcacaaaaacaggttttgtcactttaaccggcatttcacggttgcgaatttgcacaatcgccgtttcgccaataccttccggcacgcgcgccagcgcaatgctgtaacccagcgtcggggagaaagtaccgctggtgataatgccttcatgctggttgccctgcgcatcggtaaagcgtaccggcagttcattacgcagcacgcctttttcggtcatcaccagaccaaccagtttttctgtaccatgctcacgctgcacttccagggcttcacgaccgataaagtcacgatctgccggttcccaggcgatggtccagcccatgttggcggctaaaggagagatggtttcgtccatctcctgaccataaagattcatgcccgcttccagacgcagcgtgtcacgcgcgcccaagccacatggcttaacacccgcttccaccagcgcacgccagaaatcggccgctttttcattgggcagcgcaatttcatagcccgcttcaccggtataaccagtggtggcaataaacagatcgcccgcctgcacgccaaagaacggtttcatcccttccaccgcctgacgctgggcgtcattaaacagtgtggcagcttttgcctgcgcattcggcccttgcacggcaatcatggaaaggtcatcacgaacggtaatttcgatgccgaaaggttcagcgtgttgggtaatccaggagaggtctttttcgcgggtggcggagttaacaacgaggcggaagaaatcttcagtaaagtagtagacgatgaggtcatctatcacaccgccagaggcattcaacatcccgctgtaaagggctttgccgcttttggtgagcttcgccacatcgttcgccagcagataacgcagaaactcccgggtgcggctgccgcgaagatcgacgatggtcatatgactcacatcaaacattccggcatcggtacgtaccgcatgatgttcgtcgatttggctaccgtaatgcagcggcatcatccagccgtggaaatccaccatgcgagcgccgcaaagcgtgtgttgttcgtacaaaggagtctgttgtgccatcttgtcctcattgaataagcggggctgacaactttttcatggtgaaattatcaccacgaaacccagcatcggagccactcccggtccccaacgcaatcgttctcttttgcctgaacttaccaccgaaacagactgttaaccataaggtaaaattgatcatcacattagcttatggttaaaaaatgcaaaaatcgcgacagaataaaaaaccaaaaaatacaccagtttctatacaaagatgatgtgatgagaaagtcaatttgaataagacaatattaagagctaaaaaaatgtcaaaaaacactaaatcaaaaaataatggcattagaaaatataatgcgaaaacggaggtgaaattagtttatttcaaatgaggaaaatctcccggcgaaaaaaccgggagatgaaagtgtgatgggtatcaaataaacaacagaggagaaatttttaacgcagccattcaggcaaatcgtttaatcccattgcctggcggataagttgcggcttaacgccaggaagcgtgtcggccagtttcaaaccaatatcacgcagcagttttttcgccggattggtaccggaaaacagatcgcggaatccctgcataccagccagcatcaacgccgcactgtgcttgcggctacgctcatagcgacgcagataaatgtactgcccgatgtctttcccctgacgatgcaaccgtttcagttcggcaatcagctctgcagcatccataaagccgagatttaccccctgccccgccagcgggtgaatggtatgtgcggcgtcgcccaccagcgccagacggtggctggcaaactggcgcgcataacgccccgtcagtgggaacacctgacgcgcgctctcaaccttgcataagcccaggcgattatcaaaagcgatatttaacgcgcgattaaattcgtcttcacttgcctgctgcatccgctgcgcttcctctgggctcagactccagacaatgctgcaaagatgcggatcgctaagcggtaaaaaggccagaatgccttcgccatggaaaacctgccgcgccaccgcatcatgcggttcttccgtgcgaatggtcgctaccagcgcgtgatgctgataatcccagaaagtcagcggaatatcggctttgttgcgcaaccaggaattagcgccgtccgcgccaatcaccagacgcgccgttaacatgctgccatctttcagcgtcaggaaggtttcattttctccccaggcgacctgctgtaattctgcgggggctaacagagtgatatcactgctctgatgcgctttgttccacagcgcgtagtgaatcacactattttcaacgatatgcccaagatggctatagcccatgctttgatcgtcaaagctaatgtgaccaaagctgtctttgtcccacacttccataccgtgataacagctggccctacgagagagaatgtcctgccagacgccaagacgggtgagtaatttttcgctggcggcattgatagcgctaacgcgcagttgtggtggtgcattcgccgccagaggttcctgtacgcgctgctccagtacggcaacgcgtaagccgctcccctgtaagccacaggcaaccgccagccccaccatgccgccgccaacaatggctacatcaacactttgcattgtttattccttaaaaccgccttcaacgcgccacccaaccgagggtgcgctgcgccagcacatcgcgtgccggggtgaataattccatcgtcatcagcccgatgttgcgcccgacaaccagcggtgcccaacggttggcaaaaagatgtacaaggctgtccgtgacgccaatggttgcttcgcgatcgctctgtcgacgctgctgataacggcacaatacgccgtaatcccccatgtcttctccgcgctcctgcgcctgagtcagggtttccgcaagactcatcacatctcgcataccgaggttaaacccttgcccggcaatcgggtgcagagtttgcgccgcattgcccaccagcacggtacgatgggtaatagatctggcggcgtgggttaacgccagcggataagcactgcgtttaccagcgtgggtaattttcccaagtcgccagccaaaggcgctctggagttcacggcaaaacttctcgtcactccagctcaacacctcttcgcgccgttccagtggatgacaccagaccaggctacagcgtccgtcagacatcggcaacatcgccagcgggccatgttgcgtaaagcgttcaaaagcgcgcccttcatgcgcaacggaagtagcaacgttggcaatcacggccagttgttcgtaaggctcctgctgccagtcaacgccgcacgcggtggctaacgcactatgggtgccatcagctgctaccagcacgcggcccgtcagcgtctcgccactctccagcgtcacttcaacgtgactctgagtacgggcaacgttagccacgcgatcagggcaatgcagcgttacgccaggtgctttacgcagcaatgcaaacagccgttgcccgacattgtgcaattcgacaacctgtcccagcgccgccagttggtaatcttctgcggcgagggtgacaaatccagcgtgaccacgatcgctgacatgcacggtggtgatggcagttgcgcaatccgccagagattgccagacgccgatgcgcgccagttgctgacaggtacccgccgccagcgctatcgctcgtccatcaaagcccggatgagcatgactctctggcgcagtcgcttcaatcaaatgtaccggcagcgccccgtgacttaaccgggaaatagccagcgccagcgtcgcgcccgccatgccgccaccgacgatgattacgctcattgctttctcgcagcaaccatcaacgcttcgatttcttccggctttttcaccacgctggcggtgaggttttcgttaccggtttcggtaatcacaatgtcgtcttcaatacgaatgccgataccgcgatattgttctggcacttctgcatccggcgcaatatacagccctggctctacggtcagtaccatgcccggttccagaatgcggctgcgatcctgaccataaacacccacgtcatggacatccagtcctaaccagtggctaaggccatgcataaagaaaggacgatgggcgttctgagcgatcagttcatcaacatcacctttcaggatgccgagttttaccaggccgctaaccatgatgcgcaccacttcaccagtgacttccagaatggaagttcccggacgatacaggcgcaggctggtttcgagagactccagcacaatgtcgtagatttcacgctgggcctgggtgaatttgccgttgaccgggaaggtgcgggtaatatcgccagcgtaacctttgtattcacaacccgcgtcaatcaacaccaggtcgccgtcgcgcatttcacactcgttttcggtgtagtgcagaatgcagccgttttcaccgctgccgacaatggtgttataggacggatagcgcgcaccgtggcggttaaattcgtggtgaatttcgccttccagatggtactcgaacattcccggacggcatttttccatcgcccgtgtatgtgccatggcggtgatttctcccgcgcggcggagtacggcaatctcttctgggcttttgaacaggcgcatttcatgaacaacaggacgccagtcgatcatcgttgccggtgcggtgagattttgccggctacctttacgcagtttttccagcgcactgttcacgattacatcagcatatgcatattcgccctgggcatggtaaaccacatccaggccgttaagtagttgataaagttgctgattgatttcgctgaatgccagtgcgcggtcaacgcccagtttctctggcgcggcatcctggcctaagcgacggccaaaccagatctccgccgtcaggtcgcgaacgcggttaaacagaacgctgtggttatgagtgtcatcgcttttaatcagcaccagcaccgcttccggttcgttaaagccggtgaagtaccagaagtcactgttctgacgataggggtattcgctgtcggcgctacgtgttacttctggtgcagcaaaaatcagcgcggcgctgccgggttgcatttgctccaccagggcctgacggcgacgctgaaactcttgccgggatatctcactcataacactctccttacgttttttgtttttagtgtagagtcggtttttgtacttctggcgcggtcggttgcggatgagtaaaggtgtcgtggcataacagcgcggcaacacgaacgtattcgatgatctcttcaaggctcatttcaagctcttcctgatcttcgtcttcgtcgtaacccagttgcgcaatgttacgcagatcgtcgatagcttcaccggtttcgccggtcactttatccagcttcggttgcgtaacgccaagaccaagcaggaagtgattgacccaacctgccaatgcatcagcccgatcgaaaacgctgacatcatcgccatcaggcagataaagctgaaaaaggaagccgtcatcctgcagggcatcgctggtggcagagtgcattttacgcagtgcctgtgccagctcatgaccgaaagccatgccttcgttcgtcaggtcgtgaagtagcggtagccaactgctgtcatcgttaccgccacatatcatcccgctgattaaaccatgcatctcagctggggtcagacccgtcccttgttggttcagatactggttcatttcgttgtaaccaggcatttcgttctgtatagacataagcattcgtcgtcaaagggaggaatattcatgatatgctaccactttgggccctggtggaccagaaaagggcttgtctcttctcatcagggtagctatagtgtcgccccttcgcagaccatgggtctaaagacgaaggcagcgcagtcaatcagcaggaaggtggcatgtctgcacaacccgtcgatatccaaatttttggccgtagtctgcgtgtgaactgcccgcctgaccaaagggatgcgttgaatcaggcagcggacgatctgaaccaacggttgcaagatctgaaagaacgcactagagtcacaaatactgaacagttggtcttcattgccgcattgaatatcagctatgagttagcgcaagaaaaagcaaagactcgtgactacgcggcaagtatggaacagcgtattcggatgctgcagcagaccatagaacaagcgttacttgaacaaggtcgcatcaccgaaaaaactaaccaaaactttgaatgacacttttcggtttactgtggtagagtaaccgtgaagacaaaatttctctgagatgttcgcaagcgggccagtcccctgagccgatatttcataccacaagaatgtggcgctccgcggttggtgagcatgctcggtccgtccgagaagccttaaaactgcgacgacacattcaccttgaaccaagggttcaagggttacagcctgcggcggcatctcggagattcccttcttatctggcaccagccatgacgcaactaccagaactcccactgacattatcccgacaagaaatccgcaaaatgattcggcaacgtcgtcgtgcgttaacgccggaacaacagcaggaaatgggtcaacaagccgctacccggatgatgacttatcccccggtggtgatggcacatacggtcgctgtattcctctcttttgatggcgaactcgacacccagccactcatagaacaactctggcgcgccggtaagcgcgtatatcttccagttttgcatccctttagtgccggtaatttgctgttcctgaattaccatccgcaaagcgaactggtgatgaacaggttgaagatccatgagccaaaattggatgtgcgtgacgtgctacccctttcccgattagacgtgctgatcacaccgctggtcgcctttgatgagtacggtcagcgcctgggaatgggcggtggtttttatgatcggaccttacaaaactggcagcactataaaacgcaaccggtgggttatgcgcatgattgtcagttggtggaaaaactccccgttgaagagtgggatatccctcttcctgcggtggttacaccgagcaaagtctgggagtggtaagggcgatacacccgcatcgccctgattgacatcgttgattctttgacctaatttagtgagtaagggtaagggaggattgctcctcccctgagactgactgttaataagcgctgaaacttatgagtaacagtacaatcagtatgatgacaagtcgcatcataacccttctccttcaagccctcgcttcggtgagggctttaccgttacagccccatgctgccctgccatcgtaaatccccattaaataaacacaacgcattgatctgactttgatttattttctggagcagactcgcaaagtagaatgcgcaacgcggcaacggtgtggagaagggataaaaaaacgggcaagtcagtgacctgcccgttgattttcagagaaggggaattagtacagcagacgggcgcgaatggtacccggaatagctttcattgcctgcagcgctttttcggcaacgtcttcgtcggcttcaatatcaataaccacataacccatctgggcggaagtttgcagatattgcgcggcgatgttgacgccctgctcggcgaagattttgttcagcgcagttagcacgcccggacggttttcgtggatgtgcatcagacgacgcccaccgtgcagtggcaggctgacttccgggaagttcaccgcagagagcgtactgccattgtcagaatacttgatcaatttacccgcaacttccaggccgatattctcctgcgcttcctgagtgctaccgccaatgtgtggcgtcagaaggacgttgtcgaattcacacagcggagaggtaaatggatcgctattggtcgccggttccgtcgggaatacgtcgattgccgcccccgccagatgtttgctcgccagcgcatcacacagcgccggaatatccaccacagtaccgcggctagcattaatcagcaggctgccgggcttcattagactaatttctttcgcgcccatcatatttttggtggacggattctctggtacatgcagactcaccacatcgctcatattcagcaggtcagaaagatgctgtacctgagtggcgttgcccagcggcagtttattttcaatatcataaaagtaaacatacattcccaggctttcagccagaatgcccaattgcgtaccaatatgaccgtagccgatgatacccagctttttgccgcgcgcttcaaaagaacccgccgccagtttgttccacacgccacggtgcgctttagcattggcttccggcacgccgcgcaatagcagcagcagttcgccaatcaccagctccgcaacagagcgcgtattactgaacggtgcgttaaataccgggatcccgcgctttgccgccgcatccagatcaacctggtttgttccgatacagaaacagccaatagcgaccagtttttctgcggcgttgatcacgtcttcagtcagatgggtacgggatcgcaggccgatgaagtgggcatcgcggatggattcttttaattgttcatcatccagcgcgcctttgtgaaattcgatgttggtgtaaccagctgcacgaaggctttccagcgccttttggtgcacgccttctaccagcagaaacttaatcttgtctttctccaggcttacctttgccatttacccaatcctgtcttttgaaatgttgtgtgcggatttgcatccgcctttcaacatatcaaaaaataatattgcggcaatatgaacgtttgcgtcgcgatgttgaggaaatatcacgcaaaggtaattcttggatgaatatgctggtttagaggatttatttagagcaatcgacaattgcctggtaaaagcgtgacacatgtcaccaaatttaatgaagagaatttttttaacgggggaggttcccccgtcagatcatttcacaatggttttgacaccgtcaggtgtgccaatcagcgcaacgtccgcgccacggttagcaaacaagccaacagtcaccacgccaggaatcgcatttatggcgttttccatcgctatcgggtcaaggatttccatgccgtggacgtcgaggatcacgttgccattatcggtcaccacgccctgacggtattccggacgaccgcccagtttcaccagctgacgcgccactgcactacgtgccatcgggataacttctactggcagcgggaatttacccagaatatcaacctgcttggaagcgtctgcaatacagataaatttttctgcaacgctagcaatgattttttcacgggtcagcgccgcgccgccgcctttgatcatttgcatgtggccgttgatttcatctgcgccatcaacgtagatgccaaggctgtcgacttcgttgagatcaaaaacgtgaatgccgaggcttttcagtttttcagtggaagcatcactactggaaacggccccttcaatctggcctttcattgtaccgagcgcgtcaataaagtgtgcggcggtggaacctgtacctacaccaacaatggtgccgggctgaacatactgaagtgccgcccatcctactgcttttttcaattcatcctgcgtcatgatcgtttcgcctgtggtatgaaatttcacacgcattatatacaaaaaaagcgattcagaccccgttggcaagccgcgtggttaactcatccataaaatatcgcgcaatggcaggcatcccctttcgccccgcaaataaagcatacaacggtctgggtatgccgctccacggtgcaaacaggcgcaccagttcaccgttcgcaagcccctgtttacaggcaaattgaggcaataacgccacgccattcaacacaaccagggcgcgaactcgctgagcgaaatgcattagcgcaaatccctgatcttttaagctgcgcttttaaccacggatacaaatgttacccgccgacggcttcggtatatgcaacctgacacaaaattgtgtcatagtgcaggaaaaagcatttaccaggagcagacaacagcaatgaaacgcccggactacagaacattacaggcactggatgcggtgatacgtgaacgaggatttgagcgcgcggcacaaaagctgtgcattacacaaagtgccgtcagtcagcgcattaagcaactggaaaatatgttcgggcagccgctgttggtgcgtaccgtaccgccgcgcccgacggaacaagggcaaaaactgctggcactgctgcgccaggtggagttgctggaagaagagtggctgggcgatgaacaaaccggtagcactccgctgctgcttagtctggcggtcaacgccgacagtctggcgacgtggttgcttcctgcactggctcctgtgttggctgatagccctatccgcctcaacttgcaggtagaagatgaaacccgcactcaggaacgtctgcgccgcggcgaagtggtcggcgcggtgagtattcaacatcaggcgctgccgagttgtcttgtcgataagcttggtgcgctcgactatctgttcgtcagcagtaaaccctttgccgaaaaatatttccctaacggcgtaacgcgtagcgcattactgaaagcgccagtggtcgcgtttgaccatcttgacgatatgcaccaggcctttttgcagcaaaacttcgatctgcctccaggcagcgtgccctgccatatcgttaattctagtgaagcgttcgtacaacttgctcgccagggcaccacctgctgtatgatcccgcacctgcaaatcgagaaagagctggccagcggtgaactgattgacttaacgcctgggctatttcaacgacggatgctctactggcaccgctttgctcctgaaagccgcatgatgcgtaaagtcactgatgcgttactcgattatggtcacaaagtccttcgtcaggattaatccatcaaataatgcctgatagcacatatcaggcgttgtcctcacttctttttgtattccttgaatcacatcacaaaatagacaaatctcaggcggcaaaaaacgacgtctgaatgcattttttttgctggcgacaaacccacgtaaaaagctcaccgtaggcgcaaataccctcattttgattgcgttttacggagcaaataatgtctaacgtgcaggagtggcaacagcttgccaacaaggaattgagccgtcgggagaaaactgtcgacagcctggttcatcaaaccgcggaagggatcgccatcaagccgctgtataccgaagccgatctcgataatctggaggtgacaggtacccttcctggtttgccgccctacgttcgtggcccgcgtgccactatgtataccgcccaaccgtggaccatccgtcagtatgctggttttagtacagcaaaagagtccaacgctttttatcgccgtaacctggccgccgggcaaaaaggtctttccgttgcgtttgaccttgccacccaccgtggctacgactccgataacccgcgcgtggcgggcgacgtcggcaaagcgggcgtcgctatcgacaccgtggaagatatgaaagtcctgttcgaccagatcccgctggataaaatgagcgttagcatgaccatgaatggcgcagtgctaccagtactggcgttttatatcgtcgccgcagaagagcaaggtgttacacctgataaactgaccggcaccattcaaaacgatattctcaaagagtacctctgccgcaacacctatatttacccaccaaaaccgagtatgcgcattatcgccgacatcatcgcctggtgttccggcaacatgccgcgatttaataccatcagtatcagcggttaccacatgggtgaagcgggtgccaactgcgtgcagcaggtagcatttacgctcgctgatgggattgagtacatcaaagcagcaatctctgccggactgaaaattgatgacttcgctcctcgcctgagcttcttcttcggcatcggcatggatctgtttatgaacgtcgccatgttgcgtgcggcacgttatttatggagcgaagcggtcagtggatttggcgcacaggacccgaaaagtctggcgctgcgtacccactgccagaccagtggctggagcctgactgaacaggatccgtataacaacgttatccgcaccaccattgaagcgctggctgcgacgctgggcggtactcagagtctgcataccaacgcctttgacgaagcgcttggtttgcctaccgatttcagtgcacgcattgcccgcaacacccagatcatcatccaggaagaaagtgaactctgccgcaccgtcgatccactggccggatcctattacattgagagcctgaccgatcaaatcgtcaaacaagccagagctattatccaacagatcgacgaagccggtggcatggcgaaagcgatcgaagcaggtctgccaaaacgaatgatcgaagaggccagtgcgcgcgaacagagcctgatcgaccagggcaagcgtgtcatcgttggtgtcaacaagtacaaactggatcacgaagacgaaaccgatgtacttgagatcgacaacgtgatggtgcgtaacgagcaaattgctagcctggaacgcattcgcgccacccgtgatgatgccgccgtaaccgccgcgttgaacgccctgactcacgccgcacagcataacgaaaacctgctggctgccgctgttaatgccgctcgcgttcgcgccaccctgggtgaaatttccgatgcgctggaagtcgctttcgaccgttatctggtgccaagccagtgtgttaccggcgtgattgcgcaaagctatcatcagtctgagaaaagcgcctccgagttcgatgccattgttgcgcaaacggagcagttccttgccgacaatggtcgtcgcccgcgcattctgatcgctaagatgggccaggatggacacgatcgcggcgcgaaagtgatcgccagcgcctattccgatctcggtttcgacgtagatttaagcccgatgttctctacacctgaagagatcgcccgcctggccgtagaaaacgacgttcacgtagtgggcgcatccagtctggctgccggtcataaaacgctgatcccggaactggtcgaagcgctgaaaaaatggggacgcgaagatatctgcgtggtcgcgggtggcgtcattccgccgcaggattacgccttcctgcaagagcgcggcgtggcggcgatttatggtccaggtacacctatgctcgacagtgtgcgcgacgtactgaatctgataagccagcatcatgattaatgaagccacgctggcagaaagtattcgccgcttacgtcagggtgagcgtgccacactcgcccaggccatgacgctggtggaaagccgtcacccgcgtcatcaggcactaagtacgcagctgcttgatgccattatgccgtactgcggtaacaccctgcgactgggcgttaccggcacccccggcgcggggaaaagtacctttcttgaggcctttggcatgttgttgattcgagagggattaaaggtcgcggttattgcggtcgatcccagcagcccggtcactggcggtagcattctcggggataaaacccgcatgaatgacctggcgcgtgccgaagcggcgtttattcgcccggtaccatcctccggtcatctgggcggtgccagtcagcgagcgcgggaattaatgctgttatgcgaagcagcgggttatgacgtagtgattgtcgaaacggttggcgtcgggcagagcgaaacagaagtcgcccgcatggtggactgttttatcagcttgcaaattgccggtggcggcgatgatctgcagggcattaaaaaagggctgatggaagtggctgatctgatcgttatcaacaaagacgatggcgataaccataccaatgtcgccattgcccggcatatgtacgagagtgccctgcatattctgcgacgtaaatacgacgaatggcagccacgggttctgacttgtagcgcactggaaaaacgtggaatcgatgagatctggcacgccatcatcgacttcaaaaccgcgctaactgccagtggtcgtttacaacaagtgcggcaacaacaaagcgtggaatggctgcgtaagcagaccgaagaagaagtactgaatcacctgttcgcgaatgaagatttcgatcgctattaccgccagacgcttttagcggtcaaaaacaatacgctcagtccgcgcaccggcctgcggcagctcagtgaatttatccagacgcaatattttgattaaaggaatttttatgtcttatcagtatgttaacgttgtcactatcaacaaagtggcggtcattgagtttaactatggccgaaaacttaatgccttaagtaaagtctttattgatgatcttatgcaggcgttaagcgatctcaaccggccggaaattcgctgtatcattttgcgcgcaccgagtggatccaaagtcttctccgcaggtcacgatattcacgaactgccgtctggcggtcgcgatccgctctcctatgatgatccattgcgtcaaatcacccgcatgatccaaaaattcccgaaaccgatcattagcatggtggaaggtagtgtttggggtggcgcatttgaaatgatcatgagttccgatctgatcatcgccgccagtaccagtaccttcagtatgacgcctgtaaacctcggcgtcccgtataacctggtcggcattcacaacctgacccgcgacgcgggcttccacattgtcaaagagctgatttttaccgctagcccaatcaccgcccagcgcgcgctggctgtcggcatcctcaaccatgttgtggaagtggaagaactggaagatttcaccttacaaatggcgcaccacatctctgagaaagcgccgttagccattgccgttatcaaagaagagctgcgtgtactgggcgaagcacacaccatgaactccgatgaatttgaacgtattcaggggatgcgccgcgcggtgtatgacagcgaagattaccaggaagggatgaacgctttcctcgaaaaacgtaaacctaatttcgttggtcattaatccctgcgaacgaaggagtaaaaatggaaactcagtggacaaggatgaccgccaatgaagcggcagaaattatccagcataacgacatggtggcatttagcggctttaccccggcgggtagcccgaaagccctacccaccgcgattgcccgcagagctaacgaacagcatgaggccaaaaagccgtatcaaattcgccttctgacgggtgcgagtatcagcgccgccgctgacgatgtactttctgacgccgatgctgtttcctggcgtgcgccatatcaaacaagctccggtttacgtaaaaagatcaatcagggcgcggtgagtttcgttgacctgcatttgagcgaagtggcgcaaatggtcaattacggtttcttcggcgacattgatgttgccgtcattgaagcaagcgcactggcaccggatggtcgagtctggttaaccagcgggatcggtaatgcgccgacctggctgctgcgggcgaagaaagtgatcattgaactcaatcactatcacgatccgcgcgttgcagaactggcggatattgtgattcctggcgcgccaccgcggcgcaatagcgtgagcatcttccatgcaatggatcgcgtcggtacccgctatgtgcaaatcgatccgaaaaagattgtcgccgtcgtggaaaccaacttgcccgacgccggtaatatgctggataagcaaaatcccatgtgccagcagattgccgataacgtggtcacgttcttattgcaggaaatggcgcatgggcgtattccgccggaatttctgccgctgcaaagtggcgtgggcaatatcaataatgcggtaatggcgcgtctgggggaaaacccggtaattcctccgtttatgatgtatagcgaagtgctacaggaaagcgtggtgcatttactggaaaccggcaaaatcagcggggccagcgcctccagcctgacaatcagcgccgattccctgcgcaagatttacgacaatatggattactttgccagccgcattgtgttgcgtccgcaggagatttccaataacccggaaatcatccgtcgtctgggcgtcatcgctctgaacgtcggcctggagtttgatatttacgggcatgccaacagtacacacgtagccggggtcgatctgatgaacggcatcggcggcagcggtgattttgaacgcaacgcgtatctgagcatctttatggccccgagcattgctaaagaaggcaagatcagtaccgtcgtgccaatgtgcagccatgttgatcacagcgaacacagcgtcaaagtgatcatcaccgaacaagggatcgccgatctgcgcggtctttccccgcttcaacgcgcccgcactatcattgataattgtgcacatcctatgtatcgggattatctgcatcgctatctggaaaatgcgcctggcggacatattcaccacgatcttagccacgtcttcgacttacaccgtaatttaattgcaaccggcagcatgctgggttaatgactcgtcccgtcacgatcttcagcaatatgctgaagcatcgtggcggtataacgatgatttctgatactataaagatattcctgcatatacatcggcctgtgcggtgcatcaaaatatttcagcgttgccggattcaccagtcgccaggcaaaatgcgggatcaccgtcagaaaatgtccgcgctccacggcgctgattttggccataaaactgtagggacgataaataatggttggattgatcccacaaggtcgcatattcgcatcaatcattgcttcgaagttggcccggttctgaaagcgcatttgtagccagggcagctcctgaagcagctcttgctcttgtcgctcttcataacggcgagaaacgagaaagcctaatcgcagcggtggtagttcactgatagtcaggttttccagttcctgaactcgtgcagatacatgctgtggggagataataaaatctaactggcggtcaaaaagattatcgataacgccattttcgctgaactcaactggctgggcggtcacgccttcatacttatctccgagactaatcaactgatcgaaaataattgtcggataagtattatctatgccaatcacaatttctcgactacgacgcccactgttatggatttcattatcaatcgcagaaagccgttgataaaccgggaacagtttttgatacagttcctgtccggctttattgaggctgatattattatctttgcgggtaaatagcgtatagccaatttgttcttccagcgcggcaatgcttttaccaaatgggctagccgtcatatggattttttctgccgcccgggcaatattattggtttgcgctaataaaatgaaattgcgcatctttttgctaataaaaatgtccatccccctcccccgcatccttgtccgcttaaccgtttcagtcagcctatccttgatgaaaccgcgagcaaagataggtgattacgtcatggttttacagaaaattacagaaaaaggaggcaatatcgggtaaaggcattagcccgacgaatacgtcgggctacaaatattattgtgctgcaggtgttttagcgggttgttgatccacaggttctaactggaagaccacatcgacctgatcatcaaactgaatagcggcctgctcgtaagtttcctgggcggacaccggcgcggcatcggctttcatcatccgcaccattgggctgggctgatagttggaaacatggtagcgcacgctatataccggccccagtttacgatgaaagccgttcgccagttcctgcgcctgatgaatcgcgttatcaatcgctgccttacgcgctttgtctttataggcatccggctgcgccacgcccaggctcacagaacgaatttcgttaagacccgccttcagcgcgccatccagcaaggaattcagtttgtctaactgacggagcgtgacttccaccgttctcacagcgcggtagcctttaaggatacttttaccatcctgataatcataatctggctgggtgcgtaagttcgcactgctgatatcttttttcgcgatctgattgagttcaaggaaggaaatgtattgtgcgacgcgctcatctgcctgtttcttggcagtagcggcatccttcgcggccacgttaacttcaatcgcaagagtggcaatgtctggcaccgcatccacgcttgccgtaccggaggtgacaatatgcggtccatccggcaattcgttagcctgcgctgccatcccgctaatacccattaatgccgccagggcgataactttgaacttcacgttagtctctccgtgttaattgacttgcccaaaattcaggacctctggaggcaagcttagcgcctctgttttatttttccatcagatagcgcttaactgaacaaggcttgtgcatgagcaataccgtctctcgccagctgcaaggcaataaaccacataacacatcccacaaccagattgataatgcgctgtgcttttgccgtgcgcagacgcggtgccagccaggctgcgagaagagccagaccaaagaaccacaggaaagaggcgctaattgtcccgagtgcaaaccagcgttttggttccacatcaagttgcccgccaaggctgcccagtacaacaaaagtatccaggtaaacatgcggattcagccaggtcactgccaacatggtggcgataattttccatctgccttgcttcatgacttcggcgctggctaactcaatattactgctcattgctgttttaaaagcgccaaaaccataccacagcaagaaggctacgccgccccaggtgaccagcgccagcaaccacgggctctgcatcaataacgcgctgccaccaaaaatcccggcgcaaatcaggaccaaatcgctgatagcacaaagtaaggcaatcataatgtggtactgacgacgtatgccctgattcatcacaaaagcattttgtggaccgagcggtaggatcatagccgccccaagtgcaagaccttgaaagtaataagaaaacacgttggatattccgaattaagtatctgatgcagagactatatcgcgggattgttattagcggaaattgataatattaattggcaatcagaaaaactaataagagagaggccagagagtattatctggcctcagcgttgattacgcagctttgtcttctttcacccgcttaaagttcacatccatttgcgggtacgggaagctgataccggcggcatcaaattcacgtttaatacgctccagcacatcccagtacacgttttgcagatcgccgctgttgctccagacgcggaccacgaaattaatgctgcttgcaccaagttcgttcaggcgcacagtcatttcgcgatctttcaaaatgcgatcttcagactggataatattggtcaggatctgcttaacctgatcgatatcggaatcatacgccacgccaataataaattcgttacggcgaactggctcgcgggagaagttaataatatttccggcaataattttaccgttcggaataacgataattttaccgtctgcagtacgcatggtggtggagaaaatctgcacactcagcacagtaccggctacgccgcccaggtcaacatattctccggcacggaacgggcggaacatgacaagtaacacgccagcggccaggttagacagactcccctgcaaagccagaccaacagctaagcctgcggcaccgagtacagcaatgacactcgcggtttgtacacccacgcgtcccagtgcagcgattagcgtaaaggcgataataccgtaacggactaatgcagaaagaaaatcagcaacagtggcatcgattttacgggagatcatcaggcgattcaccgcgttggaaatcatccgcgcgataatcaaaccaacgatgatgatcgcgagtgccgccacgatgtttactgcataacttagcagcagcgcctggttagctaccagccagcttcccgcgccgtttatgctatcgacaacattcaaatcttccattcaatattccttttcaactgactcaaaatggagaaatacactccgccgccttatgacgggcagtctgacaagggtaaacaataaagcataattttgccaaatagatcacagatttctcatctgaatcaccttgcttttggcgaaaaaatccccgcagagcggggctcagacagatatcaatgtgcgctttgtcatgccggatgcggcgtgaacgccttatccggcctacaaaaacctgcaaattcaatatattgcaggatacgtgtaggcctgataagcgtagcgcatcaggcaattttgcttttggcgaaaaaaagacccgcagagcgggccttgagataagcagaaaggaatatcttacagaacgtcgatcgcgttcagttcctggaatgctttctccagacgagcgatcatgctagtctgaccggcacgcagccatacgcgcggatcgtagtatttcttgttcggctgatcttcgcctttcgggttacccagctgaccctgcagataagcttcgttcgctttgtagtagttcagaacgccttcccaggttgcccattgggtatcggtatcgatgttcatttttactacgccgtagcttacggagtctttgatttcctgagcagtagaaccggaaccaccgtggaatacgaagttcaggctgttgtgcggcaggttgtgtttcttggaaacatattcctgagaatcacgcaggatggtcggagtcagaaccacgttacccggcttgtaaacaccgtgtacgttaccgaaggacgctgcgatggtgaaacgcgggctgattttgctcagttcggtgtatgcgtaatcaacgtcttccggctgggtgtacagtgcagaagcgtccatgtggctgttgtccacgccgtcttcttcaccaccggtgcaacccagttcgatttccagagtcatgccgattttggacatgcgctccaggtatttagagcagatttcgatgttctcttgcagagattcttcagacaggtcgatcatgtgagaagagaacagcggcttaccggtagctgcgaagtgtttttcacccgcgtccaacagaccgtcgatccacggcagcagtttcttcgcgcagtggtcagtgtgcaggataaccggaacaccataatgttcagccatctggtgaacgtgatgcgcaccagagatcgcgcccaggatagcagcaccctgcggaacgtcagatttcacgcctttaccagcgataaaggaagcaccaccgttggagaactgaacgataaccggcgctttaactttagcagcggtttccagtacggcgttgatggagtcagtaccgacgcagtttactgctggcagtgcgaagttgttttcttttgctacctggaaaactttctgtacgtcatcaccagtgattacgccaggttttacgaaatcaaaaatcttagacatgtctcttgtcctgtatcgtcgggccttatactcgtcatacttcaagttgcatgtgctgcgtctgcgttcgctcaccccagtcacttacttatgtaagctcctggggattcactctcttgtcgccttcctgcaactcgaattatttagagtatgaaaaattgcgtgctctaaaagcgcgctgaaacaagggcaggtttccctgccctgtgattttttacttcttagcgcgctcttcgagcatcgctactgcaggcagtactttaccttccacgaattcgaggaatgcgccgccgccagtggagatgtaggagattttgtcagcaatgccgaacaggtcgattgctgccagagtgtcgccgccgccagcgatggagaacgcttcgctgtctgcgatagcgttagccacgatttcagtacctttgcggaagttcgggaattcgaacacgccaaccggaccgttccacagaatggttttcgcattcttcaggatttcagccagttcctgagcggaagcatcaccgatatccaggatctgctcgtcagctttcacatcgttaacagatttcagggtagccggtgcagtttcagagaactcggttgctacgcgaacatcagacggaaccgggatgttgcaggtggtcagcagacgtttagcttcgtcaaccaggtcagcttcgtacagggatttacccacatcgtggccttgtgccgcgataaaggtgttagcgataccaccaccaacaatcagctggtcagcgattttagacagggagtccagaacggtcagtttggtagatactttagaaccaccaacgatagccaccatcgggcgagcaggttctttcagtgctttacccagcgcgtccagttcagctgccagcagcgggcctgcgcacgcaacgtcagcgaatttaccgataccgtgagtagaagcctgcgcgcggtgagcagtaccgaatgcgtccattacgaacacgtcacacagtgcagcgtattttttggacagggtttcgtcgtctttcttctcgcctttgttgaagcgaacgttttccagaacaaccagttcaccttcagcaacgtcaacgccgtcgaggtaatctttaaccagacgaaccgggttagacagtttgtctttcaggtagttaacaaccggcagcagagagaattcttcgttgtactcgccttcggtaggacgacccaggtgggaagttaccatcacttttgcgccttgtttcagggccagttcgatggtcggcagagaagcacggatacgcgcgtcgctggttactttcccgtcttttactggtacgttcagatccgcacggataaatacacgtttcccagcaagatccagatcggtcatcttaattacagacatggtgaatcctctcgttgattctaaaagttttgcagacgctgcttgcgtcttacctgaaagcaacagtagccatagctaacgtcgtgtcgagcattcggttagcaaagccccattcgttatcgcaccagaccaacgttttgatcaggtgtgcgccactgacccgggtttgggtgccatcgacaatggcactgtgcggatcgtggttaaaatctacagagaccaacggcaattccgtatagtcaactataccatgaaatgcaccttgtgctgctttttgcagcaacaggttgacttcattggcttttacaggtttcttcaccgtcacgcttaaatcgattgccgtcacatttatggttggcacacgtaccgcaatcgcttcaaagcgatcgttaaattgcggaaaaaatcgtgtgataccggcggccagtttagtatcgaccggaatgatgctctggctggctgcccgggtgcgacgcaggtcaggatggtatgcatcaataacctgttgatcgtgcatggcggagtgaattgtggtcacagtgccggactcaataccgtacgcatcatctaacaatttgatgacgggaattatgcaattcgtggtacaggaagcgttagaaacgatgcggtgttccgcacgaagttgatcctgattgacgccgtaaacaacggtcgcgtcgagatcgttactgccaggatgactaaagagcacttttttggccccggcggcaatatgcgcttcgccatgctcgcgggagccatatacgccggtgcagtcgaggactacatcaacgccaagttcacgccaggggaggctttgcagactacgttcatgcaatacgcggatggcgtcatcaccaacaaaaagttgatcgcgttcctgtcgtacttcccatgcaaaacggccatggctggtgtcatatttcaacaaatgcgccatgcccgcagcatccgccagttcgttgattgccaccacggtaatttccgcccggcgtccggattcatacaaagcacgaaccacattacgcccgatgcgaccgaagccatttatcgctacgcgtacggtcatagatctcctgcaaggttttccctgagcaaatttgccagacagagtaatccagcaaatcgtccggggaaaccttacctgtcgcaaactgcgactgattggttaattgtcgaacatttaatcgactgaaacgcttcagctaggataagcgaaacgtggaataaaaggaatgtttgtccagccgaagaagacatttatctgactcacatcacacttttatccccttttgtgggaagctttattccaggctggcgtaataataaccctacaataactggaataaattgtcagcttgtgaagtgataccggccttcttcagtcatctctactatcagattggcctgacggctattcatcagcacacgctcgacattggggccatcggtgcgggcataaaatgcttcggctacttgccgcgttaatcctcccgcaattttacgactaatcaagcgctcccgcagaatttgagcaggtgcatgaataaaaatagaaaaatcgcagaaagatgccaactccagccacttttcatcatccagtaacaaccagtttccttcgacgatgacgagtggtgcggtaacgtgcaacgcatcttcaacaggatcatgcttttgtcgatcgtactgcggccacgtacaatccccttccacgacctggcgcagattttccgtcagtttcgcaacgtcaaatgtctctggtgcgcctttgaaggggcgcaattgatgcgcatccagccagctattgtaatggtgaaaaccatccatcgggagcgtctgaatagcgggcagttccgggtcttgttgcgcgagatattcccagaaggtggttagggtacttttacccgtccccggcggagcgcaaagaaaaaccaccgtacgccgctgcggatttaccgtctgtaaggccgccaacatgtgcagcaacggtttatgtacattttcaatctcttcgttctggtactgtgcctgtatcttcagcccattcaccgttaattcaattttcacggcgttaattcctttaaggtggtcgttactgccagcgtcagcgccgttttgaccattccgctaaaacgcgcctcactccagacggagaaatcagcgaacttcatcgcttttaacgcgtcatagagcatcgcattgcgggttatgctattgacgttgctgataaaatcccaggtcatgtcatcggcaaatccgggcgtttcatcctgttcgttcaggtaatgccagaactgggaaaaatgcgtgatatcggcgtacaaccatttatccattttcccaacgcataaatcaaacgcagtgcaacatcaatatcgtcaagcgggccgctttgggcgagtaacggcttcactgcatattccacgatctcttcatcgttatcgacaaacaggctcggcagaaactggcgtatcccctggagcaaaatggtatgcgcagttttcataaaactaaataaattgtcctgtgcatccagttgctcaagcacatcatcttctgtcagcgtcgccattggtcttccgatagatcaccatcaatgcagggagtctattatattacacgtttggtccgcgccgccgatcagtaatgtctgcgtccgcaccccattcgccgtctgttggataccgttcaccagctcaccgcccgtcacgcccgtagcgctaaagaggatatcgttccccctcaccagttcatcgaggctgtacacacggttaacgtcaacgcccattgccttgcaacgcttgcgctcctgctctgcaatctgccgattttccgtgtaatcccctttagcctggcaaaagtcaatcagctcggcctgcatatccccgcctaatgctttaacggcacaggcagaaatcacgccttctggcgcaccgccgatggtgtacatcacatcgtaaggattatcctgccagcaggtcagcacgctggcggcgacatcgccatccggcagggcaaaaaccttcacgcccagctgtgttgcttcctcaatcgcggcactcaggcgcggtttatccagcgtaaccatgcgcagcttatccagcggtttgcctaacgctttcgccacgttgcgcaggttgtccgtcagaggcaaagacagatcaatcgcgcccgccgccagccgattaacaaccagctttttcatatacatatcgggcgcatgtaacaggctatctcgaggggcgaaagccatgaccgccagcgcattgctctgccccatcgccaccatccgcgtgccttcaatgggatcaaccgcgatatcgacttctggcccatcgcctttgcccacctcttcgccaatccacagcatcggcgcatggtcaatttctccttcgccgataaccactcgtccacgaaaagcgacgtcgtttaatgcctggcgcatcgcggtgaccgccaggccatcaattttatttttgtcgccacatccggtttgcggccaggcagccaacgctgcctgttccgtaacgcgaaataatggccacgccagggacatcattgcgcggcctccccgatatcaacgccaaattgtgccagcagatatttctcggcctgttcattccagatgccgtgcgtttcctcaaccagccgcgccaactctttaaacagcggatcggttttgcctttttcggcaaaatcggcaatggcagtgagcggcatggtcacgccgttataaatgagttttttaccgccagggatatccggcagattgagcacggtttctggcaccgcatccaggccaccgatatgggtcaccataaagctcggctgtaactgcccagtggcgctaagggcaatcgcctctttcatgtcgtccgtactaccgccagatgtaccgacgacgtgcgtgctgttgtaatggacgttgtagaaattaaacggcactttgaagtttttatccgtcggcccggcaaagaagttcagacagccatcttccgccagtaattcatcagccatctcaacgacagcaggcaccgccgcataaacaaaaatgtcatcgaacccggcatctcctgtcagcgcccgcagcatctggacaggatcgctcatccctttggtattcacatacaccagctcaatgcctttactggccgccagttccaccggcagcagcttctgtacctgcgccagacgtttgtcgtcgatatcgaccaccaccacccggctcggttgtatgccgccgttaatggcgtaatcgatagcgccaatgcccatcggacctgcacacgccagcagtgcaatattgccgccaggtttgacgcccatgcgatgctcataaacatattgcgtggtgtgataattggcatgataagcaccaataatgcagcacataggctctgccaggctcgccgcagcaaaataagagccgtgatacggtaatacgcagcccaaattaatggcgatttcgggaataatcatataagtggcattgccgccaaaatattcgtagctgtagcccgcactatatccgcttggtaaccccatcgccggttgcaatacaaaacgctggccttttttatatttgccagtgagatttttacccacttcgacaataaccccggcacattcatgcccggtaatgaccggatgattttctaaatcgtcgggtacgcgtttatgttcactaccgagtaacgccgctttccaggtgcttaaacagacgctgtcagaaattacactcaccagtaattcattatcggtaatttctggcagttcaaatacgcgcagacggacatcccgcttgccataaatagcagcaactttggttttcatttttacctctgtaatcagtgtttatgttcggcggttaattgattaaataaagtgtcgagttttggatcgccaatatagttattaatcaatatcagtggtttatccgtcacacgtttcacgcgcccttccagactggcatgagtaacgacgatatccgcatccgcaggcacgttttctatggcgtaatgttttacttcaattgccagccccgctttttccaggcgtttacggaaggtggtcgcgcccatcgcactggagcccatccccgcatcgcaaacaaaggcgatacgcttaaccctgcttaagctgaatgcaccctcttgtttcatcgccttaaccgcattggcactctgagcaaactcatcttcgctctccgtttccaccgttttttccatcttcagtatcaggctagtaatagcaaaggacaccagggtacctaccgtaacaccggcaattgtcgccaggaagctgcctttcggcgtcagtgccaggtaagcaaagatagaccccggacttgggccagccaccagaccaccgtccagtaagttaaacatccaggtgccagacataccgcccgcaatcatggcaataatggtcagcggcttcatcagcacatacgggaaatacagttcgtggatcccaccgaggaagtgaataatcatcgccccgggcgcagaacgtttactcatccctttaccaaacaaggtaaacgccagcagcagccccaggcccggacctgggttagaggccaccataaagaagatggatttaccgttaacgctagcctgttgcattcccagcggataatagacgccctgatcgatcgcattattgaggaaaagcactttcgccggttcattgatgacactcaacaatggcagataacccgcatgtaccagcgcctcaatacactctttgacgaaagtattggcaattaacaccgccgggccgataacttcaaaacccagcagacaaaggagcatccccgcgatacctaaactgaagttattgataaccatctcaaaaccggcaggtatgcgtttttccagtgccttatcgacatattttatgaccaacccaccgagcggccccatgatcatactgccaaggaacatcgggatctctgcgccaacgatcacaccaatagtacctattccgcccatgaccgccccgcgtttaccgccgaccagatgaccacctgtagaaccaatcatcacgggcaataaataggtaatcatcgggccgacaattttggcgaaatgttcgttaggcagccaaccggtgggaataaataacgcagtaataaaaccccaggcaataaaagcaccaatattggggatgaccattgcagtcaaaaagcccccaaaagcctggacctttgcacgagcagacttgttttccataatattatcctgtagaggagagagtaattatccgcggctgataatgtccgctaattgtttttcactacttgctgttaagagttgttcgagtatttcttcttcgcacagtaattcacttaacgcctgaatagcgccaatgtggctatcggcatcggcagcagagagtccgatgagtaatttaattggttcgtcattccccggaaaataaacaccttgttcaagtaatgtcaaagacatcccggttttaagcgccccacattccggtcgcgcatgaggcattgccacgcctggtgcgagaatataataagggccattgttaatggtggaatctttaattgcctgaatgtaattctcgctgatatagtttttatccagcaaacttaccatgctgaaatcgatagcttcctgccaatcttttgcactatgtataacactgatactactttctggaaaataatcactaagccgcataaattatccttattttatttttagggtaccgtccggcggtaaaaataaaatactcgtgcggtttaatgaaagcaattgagcagggaaaccggtgttttgaaaacagtgaattattaatttcttatataacattgagttatagatataacaacaaatgtcaatacgcatatcgtgatgcatattacataattgatatttattgcatataaatatttgtgatctacaacacgccttatctattgcttgtccgcaaacggacatatcaaggtaataaaaaaggtcgccgaagcgacctttttacccgaaatgctaattacagcagttcttttgctttcgcaacaacgttatcaacagtgaagccgaactcttcaaacagcagctctgccggagcagattcaccgaaggtggtcataccgacgatagcaccgttcaggccaacatacttgtaccagtagtcagcaatacccgcttctacagcaacgcgtgcagtaaccgctttcggcagtacggattcacggtaagcagcatcctgcttgtcaaatgcgtcggtagacggcatggacaccacgcgcgctttcacgccttcggcagtcagtttttcgtaggcagcaacagccagttcaacttcactaccggtagcgatgaaaatcagttccggctgaccggcgcagtctttcagcacataaccaccgcgcgcgatgtttgccagttgctcttcagttcgttcctgctgcgccaggttctgacgggagaggatcagtgcggtcgggccgtcctgacgctcaacaccgtatttccacgcgaccgcggattcaacctggtcacacggacgccatgtagacatgttcggggttacgcgcagagaagcgacctgctcaaccggctggtgagtcgggccgtcttcgcccagaccgatggagtcgtgggtgtaaaccatcacctgacgctgtctcatcagcgcagccatacgtacggcgttacgtgcgtattccacgaacatcaggaaggtggaggtgtacggcaggaagccaccgtgcagggagataccgttagcaatcgcggtcataccgaactcgcgaacaccgtagtggatgtagttacccgcagcatcttcgttgattgctttagaaccagaccacagggtcaggttagacggcgccaggtcagcagaaccgccgaggaattccggcaacagcggaccgaacgcttcgatagcattctgagacgctttacggctggcgattttcgccggattagcctgcagtttagcgatgaactctttcgctttagcgtcgaagtcagacggcatttcgcctttcatacggcgggtaaattcagcggcttcctgcggataagctttcgcgtaagcagcgaatttctcgttccatgcggattctttcgcctggcctgcttctttcgcatcccactgagcatagatttcagacgggatttcgaacggcgcatatttccagcccagttgttcgcgggtcagggcaatttcagcgtcgcccagcggcgcaccgtgggagtcgtgggtaccggctttgttcggggaaccgaaaccgatgatggttttgcacatcagcagggaaggtttgtcagtcactgcgcgcgcttcttctactgcgcgtttgatagatgccgcgtcatgaccgtcgatgtcgcgaataacgtgccagccgtaagcttcgaaacgcattgcggtgtcgtcggtgaaccagccttcaacgtgaccatcgatagaaataccgttgtcatcgtagaatgcaatcagtttacccagcttcagcgtacccgccagagagcaaacttcgtgggagatgccttccatcatgcagccgtcgcccatgaaggcgtaggtgtagtggtcgacaatgtcgtggcccggacggttaaactgcgccgccagcgttttttctgcaatcgccataccgactgcgttggcaataccctgacccagcggaccggtggtggtttccacaccagcggtgtaacccacttccgggtgacccggagttttagagtgcagctgacggaagtttttcagttcttccatcggcagatcgtaaccggtgaggtgcagcaggctgtagatcagcatggagccgtggccgttggacagcacgaagcggtcacggtcagcccaggacggattctgcgggttgtgtttcaggaaatcacgccacaggacttcggcaatgtcagccatacccataggggcacccgggtgaccggatttggctttctgtactgcgtccatgctcagcgcacgaatagcattggcaagctctttacgactggacattttgactccagatcggatgatgaagggcacgcccttaacgacttgacgacagcgcgttttgggctacgccggaaaatttgccaacaatttaccacaagccgcgcgtcatgtacatggaacatccttttgccgcttcagaaatctctggatcatgctcgcatgttgcgcaatctactcgcccgtccgctgcgcttttccttatactgagactgagcgtcgattcacctgcaaacggcgcatttttagaataatcctgaccttgtgcggaagagaaaacatgaaaattcgcgccttattggtagcaatgagcgtggcaacggtactgactggttgccagaatatggactccaacggactgctcagtagtggagcggaagcttttcaggcttacagtttgagtgatgcgcaggtgaaaaccctgagcgatcaggcatgtcaggagatggacagcaaggcgacgattgcgccagccaatagcgaatacgctaaacgtctgacaactattgccaatgcgctaggcaacaatatcaacggtcagccggtaaattacaaagtgtatatggcgaaggatgtgaacgcctttgcaatggctaacggctgtatccgcgtctatagcgggctgatggatatgatgacggataacgaagtcgaagcggtgatcggtcacgaaatggggcacgtggcgttaggccatgtgaaaaaaggaatgcaggtggcacttggtacaaatgccgtgcgagtagctgcggcctctgcgggcgggattgtcggaagtttatctcaaagtcaacttggtaatctgggcgagaaattagtcaatagccaattctcccagcgccaggaagcagaagccgatgattattcttacgatcttctgcgccaacgcggcatcagcccggcaggtcttgccaccagctttgaaaaactggcaaaactggaagaaggtcgccaaagcagtatgtttgacgaccatcctgcatccgccgaacgcgcccagcatattcgcgatcgcatgagcgcggatgggattaagtaaagcctggtggtgtcgaacgtaggtcagataaggcgttcacgccgcatctgacatgaatggcacatttgttaccttgtgcgcattgccggatgcgatgctggcgcatcttatccggcctacgggtgccgaacgtaggtcggataaggcgttcacgccgcatccgacattaatggcacgttttacccgtgcgcatcgcatctggtgcttactcgccctttttcgccgcctgaatatacagcatttccagcgccagcgttgccgctgccagagcagtgatttcgctctgatcgtatgccggagccacttccactacgtccatcccaacaatgttgagatctttcaggccgcgtaccagtttaatagcgcgatcggaggtcaggccgccaatcactggcgtaccggtgcctggtgcaaaagcaggatccaggcagtcgatatcaaaagtcaggtaaaccggcatatcacccacaatctgtttcacttgggcgataacgtcatccacgctgcgatcgttcacctggcaggcgtccagcacggtaaagccgttgtctttatcaaactcggtacgaataccaatctgcacggaatgattcgggtcgatcagaccttctttcggcgcggtatagaacatagtgccgtggtcaaattcacaaccgttcgcataggtatcggtgtgggcgtcaaagtgtaccagcgccattttgccgaaatgcttcgcatgagcacgcagcagcggcagcgtaacaaagtggtcaccaccgaaagagagcatacgcttaccggcagccagcagcttctcggcgtgcgcctgcagcttttcgctcatctcacgggcatcgccaaaggcatataccagatcgccgcagtccacgacgttcagacgctcacgcatgtcgaaattccacgggaagcggttgtgttcccaggccagattcgtgctaacctgacggatcgctgccggaccgtggcgaccacccgcacgaccagaagtggccatatcgaacggcacgccagtaatcacccagtctgcatcgctgtcatacggctggaagttcatcggcaggcgtaaaaaaccaaaggcattggaaaccagactgttatcgtattgatgacctaaggtgctcatggatggactcctattacaaagtcgatataaaaaaacccttccgcgtcgttaggcccgacgaggaagggttggatttgtcacaataaattgtggcggattatcaccgctaaattaagcggattcaagtaacacaggacttactcatcttcaagataagtataaccgtacaaacctgcctcgaactcttcaaggaactgttgttgcagttcagcatcaagatcggttttcttcacttgatcgcggaactgggttaacagcgttttcggatcgagctgtacatattgcagcatgtccgccacggtatcgccttcgtcagacagttctacttctacgctaccgtcagggaagacgaacacgtcaaccgcttcggtatcaccgaacaggttgtgcatgttgccgaggatctcctgatatgcgccgaccataaagaaaccgagcatcggcggattctctggatcgtactccggcattggcattgtcgtggcaataccgtcaccatcaatatagtggtcgatagcaccgtcagagtcacaggtaatatccagcagcacagcgcgacgttccggcacttgatccagcccttccagcggcagaaccgggaacaactggtcgatcccccatgcgtccggcatgctctggaacaggctgaagttgacgtacattttgtccgccatacgttcctgcagctcgtcgataatcggacgatgagcacggttttgcggatccagctgcttttgcacttcatggcacatgctcaaataaagctgctcagcccatgcacgttcttgcaggctaaagatgccggaagagtagccgatatgaatgtcgtgcagatccatctgactgtcgtgtaaccattcacgcagagaacggcgagttcccggttcgtgcatctcctgccaggtttcccacatgctttgcagcgcgcgcggcgcatcttctgcaggcgcggtcggcaccgtgtattcgttacgttccacgccgatgatattagacaccagcacggtgtgatgcgcagtcaccgcacgaccgctttcggtgattaccgtcggatgcggcagaccgttttcttcacacgcatcgccaatcgcccagataatgttgttggcgtattcattgaggccgtagttcacgctacagtcggactggctacgagtaccttcataatccacgcccagaccgccgccgacgtcgaagcactgaatattgacgcccagcttgtgcagttccacatagaaacgcgcggattcacgaacgcctgtcgcgatatcgcgaatattcgccatctggctaccgaggtggaagtgcagtagttgcaggctgtcgagacgcccggcttcacgcagggtttcaaccagttgcagtacctgagtcgcagccaggccgaacttgcttttttccccgccggaggactgccatttaccgctaccctggctagccagacgtgcacgcacgcccagacgaggaacgacattcagacgttctgcttcatccagcacaatggcgatttcactcatcttctcaatgaccagatagaccttgtgccccatcttctcgccaattaatgccaggcggatatattcgcggtctttataaccgttgcagacgatgacgctacgggtcatgccagcatgtgccagtactgccatcaactcggctttggaaccggcttccagacccagcggttcgccgctatgaatcagggactcaatcacgcggcggtgctggttaactttgatcggataaacaaggaagtaatcgccgttatagccgtaggattccctcgcacgtttgaacgcggcgttaatggaacgcaaacggtgctgcaggatctgtgggaaacagaacagtgcaggcagacgctggccctgtgcttcacgagttttcactaactgcgcgagatcgacgcgagcttccgggacgtccgggtccgggcacacgctaatgtggcccagctcgttaacgtcatagtagttattgccccaccaggcaatattgtaagtacgcagcatcttgctggcttcctgggagctcattgcaacctcctgcatggagcgtagtacaccgtgttcgcccgcactgctaggcaaacccatagacatgtcgtcagacatagcgaacctcaaattattttattaagtgtaaaacagttaacgactatcgcagcctggaactggcttaacaacccataagcacatggattttccagcagactatgctgacgctccaactgcgcaaccggtttctttttcataacattattaagcacataaccgaacgtaagtgtgaaagttcggcgaaaccacgagaaaactcttgtttttacaagagcgcccttgttcagtcctcagtaactgtaaccagctcttgaatcctgagaagcgccgagatgggtatagcaagcgcaggtatgcaaagcagagatgcagagtgcggggaacgaatcttcaccagaacggtgagacaggttaagcagcagacaacggttcattatttcgtaagtcctccacggccgcctgttaagacgaacccacaagccaaaactctgattagtacccggctggaagtggcaacacgaaagaaacgtcgtgtgctttttatttaagccgcgcgccgcgttttataccccacaatggcagaaaattgcaaaagataaatacgcagaatgccggcattgtcaggaaaaatttccagccacgtttttaacagaatgagacagctttcaaaaaaaagtggaaatagggtgaagaattgacctaaaatagccatccagatgttaatccatccataccgattaacactcagactgccagtgtttttaacctgcagagtcgtggtaggatccgctaccacagaaaatccacacaacagtttgagctaaccaaattctctttaggtgatattaaatatggcaaaacacctttttacgtccgagtccgtctctgaagggcatcctgacaaaattgctgaccaaatttctgatgccgttttagacgcgatcctcgaacaggatccgaaagcacgcgttgcttgcgaaacctacgtaaaaaccggcatggttttagttggcggcgaaatcaccaccagcgcctgggtagacatcgaagagatcacccgtaacaccgttcgcgaaattggctatgtgcattccgacatgggctttgacgctaactcctgtgcggttctgagcgctatcggcaaacagtctcctgacatcaaccagggcgttgaccgtgccgatccgctggaacagggcgcgggtgaccagggtctgatgtttggctacgcaactaatgaaaccgacgtgctgatgccagcacctatcacctatgcacaccgtctggtacagcgtcaggctgaagtgcgtaaaaacggcactctgccgtggctgcgcccggacgcgaaaagccaggtgacttttcagtatgacgacggcaaaatcgttggtatcgatgctgtcgtgctttccactcagcactctgaagagatcgaccagaaaagcctgcaagaagcggtaatggaagagatcatcaagccaattctgcccgctgaatggctgacttctgccaccaaattcttcatcaacccgaccggtcgtttcgttatcggtggcccaatgggtgactgcggtctgactggtcgtaaaattatcgttgatacctacggcggcatggcgcgtcacggtggcggtgcattctctggtaaagatccaagtaaagtggaccgttccgcagcctacgcagcacgttatgtcgcgaaaaacatcgttgctgctggcctggccgatcgttgtgaaattcaggtttcctacgcaatcggcgtggctgaaccgacctccatcatggtagaaactttcggtactgagaaagtgccttctgaacaactgaccctgctggtacgtgagttcttcgacctgcgcccatacggtctgattcagatgctggatctgctgcacccgatctacaaagaaaccgcagcatacggtcactttggtcgtgaacatttcccgtgggaaaaaaccgacaaagcgcagctgctgcgcgatgctgccggtctgaagtaatctttcttcacctgcgttcaaaggccagcctcgcgctggcctttttcttttggataggcgttcacgccgcatccggcaaaaaaaccgcccgcacaataacatcattcttcctgatcacgtttcaccgcagattatcatcacaactgaaaccgattacaccaaccacaacagacaaagatttgtaatattttcatattattattcggttttcacagttgttacatttcttttcagtaaagtcttaattgcagataacagcgtttaatctatgatgatataactcaattattttcatgcacttaaatcataactaagataaatgttagtgtaagcgattacactgatgtgatttgcttcacatctttttacgtcgtactcacctatcttaattcacaataaaaaataaccatattggagggcatcatgcctgacgctaaaaaacaggggcggagtaacaaggcaatgacgtttttcgtctgcttccttgccgctctggcgggattactctttggcctggatatcggtgtaattgctggcgcactgccgtttattgcagatgaattccagattactagccacacgcaagaatgggtcgtaagctccatgatgttcggtgcggcagtcggtgcggtgggcagcggctggctctcctttaaactcgggcgcaaaaagagcctgatgatcggcgcaattttgtttgttgccggtagcctgttctctgcggctgcgccaaacgttgaagtactgattctttcccgcgttctactggggctggcggtgggtgtggcctcttataccgcaccgctgtacctctctgaaattgcgccggaaaaaattcgtggcagtatgatcagcatgtatcagttgatgatcactatcgggatcctcggtgcttatctttctgataccgccttcagctacaccggtgcatggcgctggatgctgggtgtgattatcatcccggcaattttgctgctgattggtgtcttcttcctgccagacagcccacgttggtttgccgccaaacgccgttttgttgatgccgaacgcgtgctgctacgcctgcgtgacaccagcgcggaagcgaaacgcgaactggatgaaatccgtgaaagtttgcaggttaaacagagtggctgggcgctgtttaaagagaacagcaacttccgccgcgcggtgttccttggcgtactgttgcaggtaatgcagcaattcaccgggatgaacgtcatcatgtattacgcgccgaaaatcttcgaactggcgggttataccaacactaccgagcaaatgtgggggaccgtgattgtcggcctgaccaacgtacttgccacctttatcgcaatcggccttgttgaccgctggggacgtaaaccaacgctaacgctgggcttcctggtgatggctgctggcatgggcgtactcggtacaatgatgcatatcggtattcactctccgagcgcgcagtatttcgccatcgccatgctgctgatgtttattgtcggttttgccatgagtgccggtccgctgatttgggtactgtgctccgaaattcagccgctgaaaggccgcgattttggcatcacctgctccactgccaccaactggattgccaacatgatcgttggcgcaacgttcctgaccatgctcaacacgctgggtaacgccaacaccttctgggtgtatgcggctctgaacgtactgtttatcctgctgacattgtggctggtaccggaaaccaaacacgttagcctggaacatattgaacgtaatctgatgaaaggtcgtaaactgcgcgaaataggcgctcacgattaatctccccaagcttcctcccatcgcggaggaagccacctcttgcagtcatcttttcttcgctctatcctctgccgctatgaaaacatcccgtctccctatcgccatccaacaggccgttatgcgtcgcctgcgggaaaaactcgcccaggccaacctgaagctagggcgtaactacccggagccaaaactctcttacacccagcgcggaacctccgccggaacggcctggctggaaagctatgaaattcgcctcaatcccgttttgctgttggaaaacagtgaagcttttattgaagaagtggtaccgcacgaactggcacatttgctggtatggaaacatttcggccgcgtagcgccacatggcaaagagtggaagtggatgatggaaaacgtgctgggtgttcccgcccgtcgtacgcatcagttcgaactgcaatccgtgcgtcgcaacaccttcccctaccgctgcaagtgccaggagcatcagcttaccgtacgccgccataatcgcgtagttcgtggcgaggccgtctatcgctgtgttcactgcggtgaacagctggttgcgaaataaccatctgaactatcaggaactttcctgatttggctgattgcataccaaaacagctttcgctacgttgctggctcgttttaacacggagaagtgcctacactagcgggattctttttgttaacccctaccccacgcgtacaaccgcgtggggagacgacgcggatttttaactatgcgtatcccccgcatttatcatcctgaaccactgaccagccattctcacatcgcgctttgcgaagatgccgccaaccatatcgggcgcgtactgcgcatggggccggggcaggcgttgcaattgtttgacggtagcaaccaggtctttgacgccgaaattaccagcgccggcaaaaaaagcgtggaagtgaaggtgctggaaggccagatcgacgatcgcgaatctccgctgcatattcacctcggtcaggtgatgagccgtggtgaaaaaatggaatttactatccagaaaagcatcgaactcggtgtaagcctcattacgccacttttttctgagcgctgcggcgttaaactggatagtgaacgtctgaacaagaagcttcagcagtggcagaagattgcaattgctgcctgtgagcagtgtggtcgtaaccgggtgccggaaatccgtccagcgatggatctggaagcctggtgtgcagagcaggatgaaggactgaaactgaatcttcacccgcgcgccagtaacagcatcaatacgttgccgttaccggttgaacgcgtccgcctgctgattggcccggaaggcggtttaagcgcagatgaaattgccatgactgcccgctatcaatttactgatatcctgttgggacctcgcgttttgcgtacagagacaactgcgctcaccgccattaccgcgctacaagtacgatttggcgatttgggctaacggagaagaataatgatcaagctcggcatcgtgatggaccccatcgcaaacatcaacatcaagaaagattccagttttgctatgttgctggaagcacagcgtcgtggttacgaacttcactatatggagatgggcgatctgtatctgatcaatggtgaagcccgcgcccatacccgcacgctgaacgtgaagcagaactacgaagagtggtttagcttcgtcggtgaacaggatctgccgctggccgatctcgatgtgatcctgatgcgtaaagacccgccgtttgataccgagtttatctacgcgacctatattctggaacgtgccgaagagaaagggacgctgatcgttaacaagccgcagagcctgcgcgactgtaacgagaaactgtttaccgcctggttctctgacttaacgccagaaacgctggttacgcgcaataaagcgcagctaaaagcgttctgggagaaacacagcgacatcattcttaagccgctggacggtatgggcggcgcgagcattttccgcgtgaaagaaggcgatccaaacctcggcgtgattgccgaaaccctgactgagcatggcactcgctactgcatggcgcaaaattacctgccagccattaaagatggcgacaaacgcgtgctggtggtggatggcgagccggtaccgtactgcctggcgcgtattccgcaggggggcgaaacccgtggcaatctggctgccggtggtcgcggtgaacctcgtccgctgacggaaagtgactggaaaatcgcccgtcagatcgggccgacgctgaaagaaaaagggctgatttttgttggtctggatatcatcggcgaccgtctgactgaaattaacgtcaccagcccaacctgtattcgtgagattgaagcagagtttccggtgagcatcaccggaatgttaatggatgccatcgaagcacgtttacagcagcagtaacccaccttagcgagaaggatctcgttgagactctgagtgacagcgcccttctttccacgcatactgggcgctgttgcttttttgaaccaggaaacagaacctctgacaatgaatttacagcatcactttcttattgccatgcctgctctccaggatccgattttccgtcgttccgtggtctacatttgcgaacataataccaatggtgcaatggggatcatcgtcaacaagccgctggaaaatctcaaaattgaagggattctggaaaagctgaagatcacgccggagccgcgtgatgaaagtatccgtctggataaaccggttatgctcggcggtccgctggctgaagatcgcgggtttattttgcatactccgccctccaattttgcttccagcattcgcattagtgacaacacggtaatgaccacttcccgcgatgtgctggaaacgctcggcaccgataaacaaccgtctgacgtattggtggctctgggttatgcctcctgggagaaaggtcaactggaacaagaaattctcgataacgcgtggctaacggccccggcagatctgaatattctgttcaaaacgccgattgccgaccgctggcgcgaggcggcaaaactgattggtgtggatattctcaccatgcctggtgtggcaggacacgcctgatgagtggaaccttactcgccttcgacttcggcaccaaaagcattggcgtagcggtcggccaacgcattaccggcaccgctcgccctttgcctgcaattaaagcacaggacggtacgccggactggaacattatcgagcgtttactgaaagagtggcagccggacgaaatcatcgtcggtttgccgctgaatatggacggcaccgagcaaccattgactgccagagcgcgtaaatttgccaaccgtattcatggccgtttcggtgttgaagtaaagctccatgacgagcgtcttagcactgtggaagcccgttccggtctgtttgaacagggcggctatcgggcgctcaacaaaggcaaagttgactctgcctctgcggttattattctcgaaagctatttcgagcagggatattaaggcgatttaaacgcctggcggagtgtaaataatatcatcgcgtcttattgccggatgcggcgtgaacaccttatccagcacacatctggcagcggctataggtctgataagacgcgttagcgtcgcatcagacatttattgcctttgtaggcccgataagcttgcgcatcgggcatggcaacgtcacaaacgcccttcccccacccggtgctgataactctgctgaaacgttatcatccccacctgctgcccggtttgaataacatgcggtaactggtgggttttcccttcgcgaatcaaattccccaccgcgggtgtgttaatcagcaattcaaatagcgccacgcgtccttcctgtttatccacttccagcttttgactcagcactgcccgtaaactacctgccagttgattacgcacggggtctttttcctgcgccggaaaactatccaccagtcgctcaactgcctgcgcggcaccacgcgtatgtaatgttgccagcaccaaatgcccggtttctgccgccgtcagtgccagacggattgtctcgctgtcacgcagctctccgagcaaaatcacatcaggatcttcccgcaatgcggcccgcaatccgcttgcgaacgtcatacagtgcaaaccaatttcccgctgctggatcaaacatcgctggctggcatagagatattcaacaggatcttccagcgtcagaatatgcgcatcggcatgttgattgagatagccaaccatcgccgccagcgtggtagatttgccactccccgtcgcccccgtcaccagaatcaggccattctcgctcttgagtaattccggcaataccgttggtgcgccaagctgttcgagctgcgggcagtggctaggtaacagccgtaacgccaggctaatgccatgccgttgcgcgaatgcgctgccacgcaatcgctggttttccgccaggctcacggcaaaatccagctgaccattctccagcaatattgcccgctgatcgtcatccagccactcccgcagtagctcttcgacgtccggcgtatcaaacggcgcagcttccattctgccgcgaatgcgccatcgtgcgggccaggcgctgcacaggtgtagatcgctgacgttatgctttacactaagggccacaatttcttccatattcatactaagatcctcggaaaatgaacgatattgcgcataacctggcacaggtccgggacaaaatcagtgcggctgcaacgcgttgcggccgttctccagaagaaattacgctgcttgcagtcagtaaaacaaaacctgcgagcgccatcgcagaagccattgatgccgggcagcgtcaatttggtgaaaactacgttcaggaaggggtagataaaattcgccactttcaggaactgggcgtaacaggattagaatggcattttattggcccgttgcagtctaataaaagccgcctggtggcagagcatttcgactggtgtcataccatcgaccgtttgcgcatcgctacccgtctcaacgaccagcgcccggcagaacttccccctcttaacgttctgattcaaattaacattagtgatgaaaacagtaagtccgggattcaactggctgaactggacgagctggcagctgcggtcgctgaactaccgcgtttacgtctgcgcgggttgatggcaatccctgcgcctgagagtgaatatgtaaggcagtttgaagttgcacgccaaatggctgtagcatttgccggactgaaaacgcgctacccgcatatcgacacgctctctctgggaatgagcgacgatatggaagccgccattgcggcaggtagcacgatggttcgtatcggcactgcaatttttggtgcgcgtgattactctaaaaaataaggaattaaaggaacgccatgaatacgttgactttcctgcttagtacggtcattgagctgtataccatggtgctgttattacgcatctggatgcagtgggctcattgtgatttttacaaccccttcagtcagtttgtagtgaaggtaacgcagccaattatcgggccactgcgccgcgttattccggcaatggggccaattgacagcgccagcctgctggttgcctatattctcagttttatcaaagccatcgtgctgtttaaagtggtgaccttcctgccaatcatctggattgccggtttactgattctgctgaaaaccatcggcctgctgattttctgggtcctgctggtgatggcgattatgagctgggtaagccaggggcgtagcccgattgaatacgtgctgattcagctggccgatccgctgctgcgcccgattcgccgcctgctaccggcaatgggtgggattgatttcagcccgatgatcctcgttctgctgctgtatgtcatcaatatgggtgtcgcagaagtattacaggcaaccggaaatatgctgctgccagggctgtggatggcgttatgaatgccgtaacagttaatgatgacggtctggttttacggctctatattcagccgaaagccagccgtgattctattgtcggtttacatggcgacgaagttaaagtcgccattaccgcgccgccggttgacggccaggccaacagtcatctggtgaagtttctcggtaagcaattccgggttgccaaaagccaggtggtgattgaaaaaggcgaacttggccgccacaaacaaattaaaatcattaatccgcaacaaatcccgccagaaatcgcggcgttaattaattaagtatcctatgcaaaaagttgtcctcgcaaccggcaatgtcggtaaagtgcgtgagctggcgagcctgcttagcgacttcggtcttgatatcgtggcccaaacagacctcggcgttgattccgctgaagaaaccggcctgacctttatcgaaaacgcgattctgaaagcgcgccatgcggcaaaagtgaccgctttaccggcaattgccgacgactctggtctggcggtagatgtgcttggcggcgcgccgggcatttactccgcgcgttattccggtgaagacgcgaccgatcaaaagaatctgcaaaaactgctggaaacaatgaaagacgtaccggacgaccaacgtcaggcgcgtttccactgcgtgctggtatatctgcgtcacgcggaagatcccactccgctggtatgccacggtagctggccgggcgtgattactcgtgaaccagcgggcactggtggctttggttatgatccaatcttcttcgtaccttccgaagggaaaaccgccgccgaactgacccgcgaagaaaagagcgccatttcccaccgtggtcaggcgttgaaactgctgctggacgctttacgtaatggttaaattacctccgctgagtctctacattcacatcccgtggtgcgtgcagaaatgcccgtactgcgatttcaactctcacgcgttgaaaggagaagtgccgcacgacgattatgttcagcatctgcttaacgatctggacaacgatgtggcttacgctcagggccgtgaagtaaagacaatctttattggcggtggtacgccgagcctgctttccggcccggcgatgcaaacgctgctggacggcgtgcgtgcgcgtttgccgctggcagcggatgcagaaattactatggaagcgaaccctggcacggtagaagccgatcgctttgtcgattatcagcgtgctggtgtgaaccgcatctctattggtgtgcagagttttagcgaagaaaagctgaaacgacttgggcgtattcatggcccgcaagaagcgaaacgcgcggcgaagctggcgagcggtttagggttacgtagctttaaccttgatttgatgcatgggctgccggatcaaagtctggaagaggcgcttggcgatctacgccaggccattgaactgaatccgccgcatctttcctggtatcaactgaccatcgaacccaatacgctgtttggtagccgaccaccggtgctgccggacgatgacgcgttgtgggatatattcgaacaggggcatcagttattaaccgcagcgggttatcagcaatatgaaacttccgcttacgccaaacccggttatcagtgccagcacaatctcaactactggcgctttggtgactacatcggtattggctgcggcgcacacggcaaagtgaccttcccggatgggcgcattctgcgtaccaccaaaacgcgtcatccgcgtggttttatgcaaggaaggtatctggaaagccagcgtgatgtcgaagccacagataagccgtttgagttctttatgaatcgcttccgtctgctggaggccgcgccgcgcgtggagtttattgcgtataccgggctttgcgaagatgtgattcgcccacagttagacgaggcgattgcccagggttatctcaccgaatgtgcggattactggcagataacggaacatgggaagctgtttttaaatagcctgctggagctttttctggctgagtaaacttgtattgccggatgcggcgtgaacgccttatccagccgacatgtggcagcggttgtaggtctgataagacgcgcaagcgtcgcatcagacgttgattgccggatgcggggtcaacgccgcatcctgctacaaatcgtgcactatatcaaacttacttaatcaccccattgcgccgcagttgttcggtatcttttttccagcgttcattagcttggttgatatcgtcaattttcatcaaaatcgcgacttttttactgtttatttcactaactttcatcgttaacggatattgccctttttcgagcgttacccagtcatcctgcaatttacggctaagtttttgactttgcagaaaagtctgtcgccgttgttcgttgatatcgaaatctcgtttctgctgaatcggcacttcataacactcttcactctgtttatgacatgccgcaatcgccggttgataaacctctttgtcatatttaaccgcgaacgcctcgctatcgttctgtttattaaactcatcacgctgttggtgaatttttttaaaggcgtcttcgcgggtcatttgcttaccgtttgcatcttttccccaatatgcatccgctgctttctgcgccgccaccatttgcttatcaagcgctttcacttccttttccagcgcaggaatgctgttcttctgggtattcaacgcagattcaagctgactaaagcgataattgaaatcttcgctattcacgatcagatatttattattcgttttgatatcgtcgaccacccgcccacgatcgctggctgccgcctgaaaagagtaaaagttcacgctccagccagacgcgggcgttcctttactggttaacatcgcgctgaattttaccggtttatctttcgtccaggtctgttcgagcagttcgtaatctgccaactgaccgacccaggtatagagatcgtcactggaagagacatcgccttccgcactccaggtggcctgattacccttagcatcaagattttttaaggtgatagcatcaagcttgagaatgccgtgatactgctttttgaattgatcttttaagatattttcagttggcggttcgccatctgcccaggcattaccagtcatcaacataagcagtgccgtgccaacaatccattgctttttcacccgaaaaacctcacgcggaataatttattccggtgattatcattagggtaattaaaattggcaatggacgtgagtctgaagtgaaaaagccccggcacgataccggggcgaggcgattagtactgattgaagatctgctggatctgctgcggatctttggtttgcgtcagagccagttgcagcagaacgcgcgctttttgcgggttcagcgtgccagaggcgacgaagccgtatttcgcatcatccacttcggcatcctgagtggtagcgcccgtcggtacgcgggaagaacgcacgactgcagtaccggttttcgcggcggtcgccagcgtgtcgaacacagatttatacaggttgccgttacccacaccagcgctaacgatgccatcatagcccgcatctaccagtgctttagccggaagatcggatgcgttagcgtagttataaacaatgccgactttcggcagttcattcagcttagagacatcgaatggcgtgtcgctggtatgcttacgtgccggggtacgctggtagtcaatcttaccgttgtgaatgtaacccagaggaccgtagttaacagacttgaaggtcgctacgtcggtggtgttggttttggtgacgtcacggccatcaagcacggtgtcattcatcactaccagcacgccacggttggcggaggctttatcagctgcggtcactaccgcgttatacaggttgaatggaccgtctgcgctcatagacgtggacggacgcattgcgccgaccatcaccaccggtttgtcgcatttcaccgtcaggtcgaggaagtaagcagtttcttccatcgtgtcggtaccgtgggtaatgacgaagccgtcggtcttatcgcagtcggtgttaatttttttcgccagtgtcagccagacattatcgttcatgtcctgggagccgatattcactacctgctcgcctttaacgttcgcaatgtcttttagttgcggcaccgcattaaccagattttctacgccaactttacccactgtgtagttagatttggttgcggagtcaccaccaccggcaatggtcccgccggttgctaaaatggtgatattgggtaatgccaatgctgcaccactaaaacccataaccagtgcggcaagtgccgtctttttgaaaaactccatttcattcctccagttacgtgaacgctacgcattatcccttagctctgtatgggaaatttgacgttaaacaatttacaacgtgaatatattttggagatctacaaagttagaggcaggtaacaaaacgaagaattaaacggcataaaaaagtattatgccgtcttaaaatagaggattattttaaattcccgaccagggctttgcggctatcttccagagtcacaacgcggctacaaacatctttgccaaactgctggaaatctttttcctgctttttccactcggtttggatactggattgcagcccccccaggcttcccagcacattctgtaatgggttaccgccgctttttcagcaccgctttcgcgcccatttcattaatgctgtcctgtaaaattccacccattgcctgattcactaattgctggccttcggcgcgaacctgatcaatggctttatagtgaaacgtcaggccatcgctgcgcgtttcaataatgcggttcatctgctctttcagctgcgcatcaagtttggtcagacggctgcgcattttgctgctttcgcccatctcctgaacgataattttatccagagcaatacgggctttctcgacgcggcttttcgcgccttcatcaatccacggcagcgtgctgcgtagttcagcctgataatccttcgcctgctcgcgctgggcggcattcagggaatattgcttaccgttatacatcacgttgccgtctggcgtgatcaccagattgccgttttcgcccttcacctgcacggtttgcgggctgacaatcacatcgtcacgcggcgtgacgctgcactggtagtcggcgtgagcggtcattgccgtcacactaagtgctgccgccagcagcattttgcgcatcatagtcttccctcaagaaaaaatcaggccagcatttgctggccccagattgataacaaagtacgcgttttccatgccggatgcggcgtaaacaccttatcccgcctactcgatcgtgcatctttccaggcctgataagcgtagcgcatcaggcagttttgcatttgtcatcgcccgtatgctttcttagtcccaccaaacgtcgaaaagttcgctggtgcgtacctcatccagtttgcgctcttccagccacttacgcacaatcgcctgatgttcttcggtgcatttgccgatttcctgcatgcagatcagaccttcccaggccagataaccgctgccgtcaaaggccagtttgttcggttcgataacctcgttaataaaatcatcaacggttttatcaatctgttcttcgcttgtaccttccgggaatcgccatgccacgctaaatcctaattcctggaattcgtcgatgtgcatttttttacgcagacgacggctacggttctttgccattatttcaccctctcgaacattaagtcccatactccgtgaccaagacgatgaccacgttgttcaaatttcgtcaccggacgacttgccggacgcggtacgtaatcattgctctcactcaggtttttataaccgtcaatagaagacatcacttcaagcatatgttccgcataaggttcccagtcggtcgccatatggaatacgccccccagctgcagtttgctttttaccagttcggcaaacggcacctgaacgatacggcgtttattatggcgcgctttgtgccacgggtcagggaaaaagagctgcaccatgcgcaaactattgtcaggaatcattttatgcagcacttcaaccgcatcgtgacacatcacgcgcaggttgcttaaaccttcttcatgcgcagaagccaggcacgcaccaacgcccggactatgcacttcaatgccgaggaagtcctgctcagggcgatctttagccattgccaccaggctcgcccccatgccaaaaccaatctcaagcgtcaccggcgcttcacggccaaaaagcgcggggaaatccagcatatcttcgctgaactcaacgcccatcaccggccagtagttttccagcgcatgttcctggcctttggtcagtcgcccctggcggcgcacaaaactacggatacggcgcagtgggcggccgttttcatcaaattccggactaatgacgtcgtttttcataaaggtttagtcgcttgtgaaagtgttctgaaaacgggcattatccaaagttagttgccggatgcaagcatgataaggccgtggctgcggaaagttccggtttacaccctgccgtcgctgtgctgcaatcttgcccccaacaacagtgaattcggtgaccatgcaagcgagccaatttagtgcccaggttctggactggtacgataaatacgggcgaaaaactctgccctggcaaattgacaagacgccctacaaagtatggctcagtgaagtgatgttgcaacaaactcaggttgcgaccgttatcccctattttgaacgctttatggcgcgcttcccgacggtgaccgatctcgccaatgcgccgctcgacgaagttctccacttgtggaccgggcttggctattacgcccgcgcgcgcaatctgcataaagcggcacaacaagtggcgaccttacacggcggtaaattcccggaaacctttgaggaagttgcagcactgccgggcgtcgggcgttccaccgcaggcgcgattctcagcctttctctgggtaagcactttccgattctcgacggtaacgtcaaacgcgtgctggcgcgctgctatgctgtaagcggctggcctgggaaaaaagaggtcgagaataaattatggagtttgagcgagcaggtgacgcccgcggttggcgtggaacggtttaatcaggcgatgatggatttgggtgcgatgatttgtacgcgcagcaaaccgaaatgtagcctctgtccgctacaaaacggatgtattgccgccgccaacaatagctgggcgctttatccgggcaaaaaaccgaaacagacgctgccggagcgcaccggctactttttgctattacagcacgaagatgaagtattgctggcgcagcgtccgccgagcggattgtggggcggtttatactgtttcccgcagtttgccgacgaagaaagtttgcggcagtggctggcgcaacggcagattgctgccgataacctgacgcaactgaccgcgtttcggcataccttcagccatttccacttagatattgtgcctatgtggcttcccgtgagcagtttcaccggctgcatggatgaaggcaatgcgctctggtataacttagcgcaaccgccgagtgttggcctagcggctcccgtggagcgtttgttacagcagttacgcactggcgcgccggtttaacgcgtgagtcgataaagaggatgatttatgagcagaacgattttttgtactttcctgcaacgtgaagcagaaggtcaggattttcagctgtaccccggcgagctgggaaaacgcatctataacgagatctccaaagaagcctgggcgcagtggcagcacaagcaaaccatgctgattaatgaaaagaaactcaacatgatgaatgccgagcaccgcaagctgcttgagcaggagatggtcaacttcctgttcgagggtaaagaggtgcatatcgagggctatacgccggaagataaaaaataaaaacagtgccggagcacgcctccggcaacttgcataaaaacaaacacaacacgcacccggaatgatgaaaaaatatctcgcgctggctttgattgcgccgttgctcatctcctgtagcacgaccaaaaaaggcgatacctataacgaagcctgggtcaaagataccaacggttttgatattctgatggggcaatttgcccacaatattgagaacatctggggcttcaaagaggtggtgatcgctggtcctaaggactacgtgaaatacaccgatcaatatcagacccgcagccacatcaacttcgatgacggtacgattactatcgaaaccatcgccgggacagaacctgccgcgcatttgcgccgggcaattatcaaaacgttattgatgggtgacgatccgagtagcgtcgatctctattccgacgttgatgatattacgattagcaaagaacctttcctttacggtcaggtggtggacaacaccgggcagccgattcgctgggaaggtcgcgcaagcaacttcgcggattatctgctgaaaaaccgtctgaagagccgcagcaacgggctgcgtatcatctacagcgtcaccattaacatggtgccgaaccaccttgataaacgtgcgcacaaatatctcggcatggtccgccaggcgagtcggaaatatggcgttgatgagagcctgattctggcaattatgcagaccgaatcttcctttaacccgtatgcggtcagccgttccgatgcgctgggattaatgcaggtggtacaacatactgccgggaaagatgtgttccgcagccaggggaaatccggcacgccgagccgcagtttcttgtttgatcctgccagcaatattgataccggcaccgcgtatctggcgatgctgaacaatgtttatctcggcggaattgataacccaacaagccggcgttatgccgtcatcaccgcctataacggcggcgcaggcagcgtgctgcgagtctttagcaatgataagattcaggctgccaatattattaacaccatgacgccgggcgatgtttatcagacgctgacgacccgccatccctctgcggaatctcgccgttatctttataaagtgaataccgcgcaaaaatcctaccgccgccgataattccattaaccgcccctgacgatgctcaggggcaaaaatgttatccacatcacaatttcgttttgcaaattgggaatgtttgcaattatttgccacaggtaacaaaaaaccagtccgcgaagttgatagaatcccatcatctcgcacggtcaaatgtgctttttcaaacactcatccgcatcacgatgtgaggaaattaacatgaatcttaagctgcagctgaaaatcctctcttttctgcagttctgtctgtggggaagttggctgacgaccctcggctcctatatgtttgttaccctgaagtttgacggtgcttctattggcgcagtttatagcagtctgggtatcgcagcggtctttatgcctgcgctgctggggattgtggccgacaaatggttaagtgcgaaatgggtatatgccatttgccacaccattggcgctatcacgctgttcatggcggcacaggtcacgacaccggaagcgatgttccttgtgatattgattaacagctttgcttatatgccaacgcttgggttaatcaacaccatctcttactatcgcctgcaaaatgccgggatggatatcgttactgacttcccgccaatccgtatctggggcaccatcggctttatcatggcaatgtgggtggtgagcctgtctggcttcgaattaagccacatgcagctgtatattggcgcagcactttccgccattctggttctgtttaccctgactctgccgcatattccggttgctaaacagcaagcgaatcagagctggacaaccctgctgggcctcgatgcattcgcgctgtttaaaaacaagcgtatggcaatcttctttatcttcagtatgctgctgggcgcggaactgcagattaccaacatgttcggtaataccttcctgcacagcttcgacaaagatccgatgtttgccagcagctttattgtgcagcatgcgagtatcatcatgagcattagccagatctctgaaaccctgttcattctgaccatcccgttcttcttaagccgctacggtattaagaacgtaatgatgatcagtattgtggcgtggatcctgcgttttgcgctgtttgcttacggcgacccgactccgttcggtactgtactgctggtactgagcatgatcgtttacggttgcgcattcgacttcttcaacatctctggtagcgtgtttgtcgaaaaagaagttagcccggcaattcgcgccagtgcacaagggatgttcctgatgatgactaacggcttcggctgtatcctcggcggcatcgtgagcggtaaagttgttgagatgtacacccaaaacggcattaccgactggcagaccgtatggttgattttcgctggttactccgtggttctggccttcgcgttcatggcgatgttcaaatataaacacgttcgtgtcccgacaggcacacagacggttagccactaattacgcaaagaaaaacgggtcgccagaaggtgacccgttttttttattcttacttcaacacataaccgtacaaccgtttcacgccatccgcatcggtttcgctataaacaccttgcagctccgggctaaatcccggcaacaaattcaccccttcttccagtgcaaggaaataacgttgaaccgccccaccccagacttccccgggtaccacgcaaagcacgccaggtggataaggcaacgccccttctgccgcaattcgcccttcggcatcacgaatccgcaccaactccacgtcaccgcgaatataagcgctatgcgcatcctgggggttcatcaccacactcgggaaactctgctggcggaacatcgctttttgtaggtctttgacgtcgaaactgacatacagatcgtgcatctcctgacacaactggcgcagggtgtagtcgcgatagcgcaccggatacttgttataaacgctcggcaacacctcaaccagcgggctgtcatcctcaatatgctgttcaaattgcgccagcatcgccaccagttgtgccagcttctcgtggctttccgccggagttaataaaaacagaatggagttgagatcgcacttctccggcacaatgccgttctcacgcagatagtgcgccagaatcgtcgccggaacgccaaagtcgctatattcgccggtttcggcatcgatacctggtgtagtgagtaacagcttgcacggatcaacaaaatactgatccgcggcatatccttcaaagccgtgccacttcgcccccggctcaaaactgaaaaaacggcggtcgctggctaacacacttgtcggataatcctgccacaatttgccatcaacaacgggcgggataaacgggcggaacagcttacagcgcgcaagaatagccttgcgcgcttcaatccctatctcaacacactcagcccacagccgacgcccactctccccttcatgaattttggcgttaacatccagtgcagcaaacagcggatagaaagggctggtagaagcatggagcataaaggcgttattcaaccgcttatgcgggcaaaaacgcgcctgtccgcggatatggttatcttttttatggatctggctcgtctgactgaatcccgcctgctgtttgtgcacgctctgagtcacaaagatccccggatcgttttcgttaagttctaacagcagcgggctgctatccgccatcatcgggataaattgttcataaccgacccacgcggaatcaaacagaatgtaatcacacagatgcccaacggtatcgatcacctgacgggcgttatagacagtgccgtcataggttcccagctgaataatcgccaggcgatacgggcgcggcaggtcggctttttctggcgcaacgtcgcgaatttgctggcgcagatactcttcattaaaacagtgcgcatcaataccgccaatgaaaccaaacgggttgcgactagcttccagatagaccggcgtcgcccccgcctgaatcagcgcgccgtgatgattgctcttatggttgttacggtcgaagagcaccagatcgccacgcgttaacagcgcattcgtcaccactttattcgctgcgcttgtgccgttcagcacaaaataggttttatcggcatgaaagactttggctgcgaatttctgcgcatctttcgcgcttccttcatgaataagcagatcgcccaattttacgtcagcgttacacatatcggcgcgaaagacgttctcaccaaagaaatcgtaaaaatggcgtccggcaggatgctttttaaaaaacgcaccatgttgatgtccagggcaagcaaaggtgctgttgcccatctcaacgtactgcgtcagcgtgtcataaaacggtggcagcaaattctcttcatactgacaggctgcggattccagctccagccactgctgctcgttgccgttgattaccgccgtaacgcccgcaggtaattcaacagcatgttcggaatacaaaaacaccggtagatgaaaaccggtgcgcttaagcaacgcaagaatgccactgcgactatccgcagcggtaatgacgactgccgcgacgtccgtaaaatcagtatctcccaacgccaccacgcgacgatgagaagaaagtcgggataccagttcactactggcggcaatattcatacttttcataagcgcaaacccgtttcggggaagtaagaataccggacaaggtggaaaaccctgccccatgagatatgggtcaaactggtcaccagctccgaccgccagacatcagtaaaagcagaaacgctctgattttactgttgtcctgcagtgagcgtgcgttaacttcaccgcatgagcagtaacatagaaagggaaacgtttcgcgcgaaacggcgataagcgagagaatgtaaggagatggcgtgcatcgggcaaactccgtacagagaggagaaaattcgcgcaatcatggcacctttcgctaaagcgtgcaagccaggactttgcgaacaaacaagccatcgacggcaccaaacggtcataataagaaaatcaaacaatacagctaacaggaactcttgtggtcatcggcccttttatcaacgctagtgcagtcttactgggtggcgttctcggcgcactgctcagccaacgcttaccggaacgtatccgcgtctccatgacaagtatttttggtctggcaagcctggggattggtattttactggtggtgaaatgtgccaaccttccagcgatggttttagctacgctacttggcgctctaattggcgaaatttgtttgctggagaaaggtgtcaatacagcagtcgccaaagcacaaaatctgtttcgtcacagtcgtaagaagccagcgcatgaatcttttattcagaattatgtcgcgattattgtcctgttttgcgccagcggcaccgggatcttcggggcgatgaacgaagggatgaccggcgatccgagtattttaatcgccaagagttttcttgatttctttacggcgatgatcttcgcctgcagcctgggtattgcggtaagcgtgattagtatcccattactgatcatccagttaacgctggcgtgggctgccgcgctgattttaccgctgaccacaccgagcatgatggcagacttcagcgccgtaggcggtttattgctgctggcaaccggattacgcatctgtggcattaaaatgttcccggtggtcaacatgcttccagcactccttctggcaatgccgctttccgccgcctggaccgcctggtttgcctgacaatgcgtgcaatatcggcaaagtgatgatagattgtgcagtctgcagtaaattgaagaaatttgattgacgagacgaggcgaatcaggtttaatgcgccccgttgcccggatagctcagtcggtagagcaggggattgaaaatccccgtgtccttggttcgattccgagtccgggcaccactaattcttaagaacccgcccacaaggcgggtttttgcttttggatctgacaataaccttcacgaaaaaaattagcttataaagtctgggggaattactctcgccacgttaacgagagtaattttattgatattaatctcctgatactttacccccgtccaaactccagccgctgcacattcaccatcccaggcttctcagcagcactgacatcaatttgtgtcacccgcagcgcatagaacgccattttgaatttacgaacggacgcattatcagtgactttaacggcatgggcaaagtgaaatatcattttttaacgataaaaagagtgttatttcttgtgtatcagacaataagcattcattcaaaacctttagaaataatcaaaacacaggtattccactggttaatatattcacatatgaaatgaataaatattggaatatataaatattgaatattttgattaatccccgtactgattattcttcataatcagtacggggttgctacaacatgtattactttttcaccacaattaacggttcaatatcactctcttttttgatgaccagactttcatcaccgcgcaaacacgtcccaccgtagttgccgccaacggtgaaggtacatacctgaatgtatttaccgtccactttcggcaaacaccacagttgctgatagatgtttttctgctcggcaaatttaccgctggttttgtccagcacctcttcatgatggctgacgaggtcgatattgctgccacagcgaccggcgatcggtttcactgcgtaacctgttttcaccagttcatcattaacagtgaaatcggtatccagcaggtaacgatggtgcgggaacaggctccagaggatcggcagaatcgctttgttgccggggatcaccgtccacagcggctcaaagaccagcacttccgggcgcagcaatacgtcgataagacgcacttcgttttgcggatgaccggtacggattggcaccgcagcaaactcacggtcgctaacttcacgaatctgatcaaacgcggtttcccacgcccaggttttccacacgcagttaaccagtcgcccttccccatcaatcagttgcccggcagcatcccagcccagttcatccaatccacgcaagatacgcgtttcaaagcccgcctggtgcagcgcctgctccataaactgcgcgtgatagttttcctcgatatctttgtcctgcatgatatggacaaacggacgtgcacgactgtgtttccaggcaccagccaattcgttaatcagcccttccgccggattgaagccgttgcctttatagccctgctccgcccaacgttcgaggatcaagcccgcttcggtatgacaggaggcggagtcggcgttgtactcgtaaaccttcaggccacgctcatccatgcagaaatccatacgaccagtgatcatatggtgacggcgacgctgccaggagagacgcaaacgtggccagaggattttcgggatgtcgaacagcgccagcaggttgtcatctttcagcaccttgtcggttgcgtgaagatacatcaggtgcagctcgttggtggctttaattagctcctgctcggcactctcggtaatggtgtagtaatgataaggatcctgattgatcacctgaccgttggcctgcacataggcgttttgcagcggatctttttcatccagccatttaccgtcaaactggcctttgttttccaggcgcgctccgctgattttcagcagctcgcctgcaatttccggctgcggtaagctgtattcagtatcttccgtctggatcatccagcccagaatggtggtgtcatcaaaagtgtctttcagggtatagcagccgttttcgaccaccatctccagctcgcgcgtccactgttgcccttgcggcaacggggaatgaatcacgttctgttccgcaatacggactttgttgccatgcaattgggtaatgatggcgacatggccagtgtctttaaattcaccgcctttatcccagataagaagcgcacccgcgaccggcgcacgcgggctgccgttaggaaatgcctgcaatggcaggatgttgtcattaaccacttctcgcaggaagcgcaggctgaaaatctcccacgccatacccacgtcagtaaagaccacaccgtaattcagaaagagaaaacggcgagcaaattcaacgcattgccacttgtggcccatatattcgtcgtcgatatagctacggaatacggcgtcatcttcgtattcctgcggatcgagagaactgtaatcactagagtagattgctaccccacctggggcgtagcccaataatgtcccgaacggggcatcctggctggtcgttcctttgctcatcactttacctttaacaatacaacctaagcagttggcgtaattgttgtgctctgattacctgctcagcgacattaaccggacagaggtcagactaatcatacacctcatcgcagcggctggcgcaaagggttaaaaaattcacattctgtacagcaagtgacctgctacactgcttcaacactaccactcagaaggcaactcactatgacagacaatacttatcagcccgcgaaagtctggacgtgggataaatccgctggcggcgcgttcgccaatatcaatcgcccggtttctggtccgacgcatgaaaaaacgctgcccgttggcaaacacccattgcaactttatagcctgggaacgccgaacggtcagaaagtaacgattatgcttgaggagctgctggcgctgggcgttactggtgcagagtacgacgcctggctgattcgtattggcgatggcgatcaattctccagcggctttgtcgaagtgaacccaaacagcaagatcccggcgctgcgcgatcatacgcataatccgccgatccgcgtgtttgaatctggtagcatcctgctttatctggcggagaaatttggctacttcctgccgcaggatttggcaaagcgtactgaaacgatgaactggctgttctggttacagggcgcggcaccgttcctcggcggtggttttggtcacttttaccattacgcaccggtaaagattgagtacgccatcaaccgctttaccatggaagccaaacgtctgctcgacgtgctggataagcaactggcgcagcataagtttgttgcgggcgatgagtacaccattgcggatatggcgatttggccgtggtttggcaacgtggtgttaggtggtgtgtatgatgccgctgagtttcttgatgcgggcagttataagcatgtacaacgctgggcgaaagaagtaggcgaacgtccggcggtgaaacgtgggcgtattgttaaccgcaccaacggaccgctgaatgagcagttgcatgagcgccatgacgccagtgatttcgagacgaatacggaagataagcgtcaggggtaagggttggtgttcgtcgcagcaagccatccaggccggataaggcgttcacgccgcatccggcaatcgtgcacaatgcctgatgcgacgctgccgcgtcttatcaggcctacgaaagctaatcatcacgcgctggtaatgtcgtaatccatttggcgcagtgcgtctaatgtggctttggcttcatcttcgtcgatgatgctcatggcaaatccgacgtgtaccagcacccactggcccagtagatcggcagggttaccttcacaaatcagggcgatattcacatcgcgcttgataccacatacttcaacctgcgcaagctggtgaatatcttcaccgacagccagcacctggcctggaacgccaatacacattattaactccggttattcaacttcaatacttttgacgatcaggctatcgccggtatcgacacgcaaccgctcgccgtgacagagcggacactgcgcatcgtgctgatgaatctccaccacctggctgcaatcccagcaccaagcctgggcgggtttatagacgatatgtaaatcgcacccttgcgccaccgttccgtggcagacaatttcaaaactaaaacggacggcgctctcctcaacgcaggagagcgcgccaatttccagccacacggcggtgacgcgcttaacatcgtgctgctccgcctgccgttggataatttcaacggcgctctggcaaagagacaactcatgcattttcgccactcctgcgaccaaacagcagggcgcgacgccctgcgtgtggtacatccggattcgtgactggcaggctaaggatcattcgtgcgcagtcatccgtcaggcgttggccctcttcaatgctcatgctgtggctaagcgggctcatcaggctacaggagagatattggctaacaccgtccagttcgccaacggtaaaggtcatagtgccatacggcagttgcagaccaattttttcactcactttgcgcagcggccagagttgatccgggccggggaagataactgcactcagcatccacggggtgatcacacaccccgtccactgaccttcgaacagcgtaaaatcagaaacatacaccggcatactaggatgcagaaaagagagatcgtgcatgctacgccgggcaatttcttcaaacactgcctgtacttgcgccttcggggaggtctggaaacctgctatctcttcagtcatgaatcgcctcccgtgggatggcttccacgccagattcacgcagcgcagccagaacctgctcaagcgcaggttcaatcattgcttcaaccgtcggcgttaagccgatgtgtggctccaggctttccgggatcacgccgaccagggtcagctttttcggaaactcgccggtgaagcgcagggcgctcaagacgtcggccaggccaagctgatgcggagagattttgttggtaaacaacgccggaacttcttcatcccgcaggatcatcatcgttcccggcgcgttctttttgctgacaatggcatccgcaataatcaaatgatcgcgatttgccatgtcgccaagcagctccattcccgccgtgccgccatcgaggatctcaacataatccggcagaatgtatcgttgctctaacgcttcgacaatccgcacaccgatggcttcatcggtcagcaaaatattgccgacccctaagactaaaatacgcattacagaaccttcacactaaccacttcgttgccgtcagcatccactacgtgtaccgcacaggccatgcacgggtcaaaggagtgaatggtacgcaccacttccagcggtttattcggatcggcaaccggtgtacccaccaggctctgctcgtaaggaccgacgtcatcattgaagttacgcggaccagagttccaggtacttggaacaaccgcctggtagttgctgatgataccgtctttaataaccatccagtgagagagcataccgcgcggcgcttcgaggaagccaacacctttgaattcacccgttgccggaatgttcggcttcacaaaggtggtgtgatcgcctttgccgatattggtgatcagtgcactgtattggttttgcaggatatcctgcaattcacagcagtgaacggtacgaccaataatacggcccagcgtggagtgcagctgtgccacttccagcgtgttgccagtcagtttctgataaatcgcaacgatttcattcagtttgttctgggtagattcgcgacctgccgccagtttcaccagcatattagccagtggccccacttctaccgttttgccgtagaaagtcggacttttcacccaggaatatttcccgtcgtcagaccaaccatcataagccggaatggtggtgccttcccacggtgcctgcggcgcttcgtctttataccaggagtgcttcgcgctttcctgaatgcctttgatcaggtattcatcggaatgagaagtgatcggacgatagctggacagatccgcattctcaatgtagccgcccgggaacaggaagctgccgtttttactgtcggtcgggaattccggcacgctcaggtagttcaccgcacctttaccgcgtgtcagccattccgggtagaacgcggcaataactgcggtatcaaccttataaacctgctcaacaaagtcgctcagtttgtcgatgaaagacttgatgtacatcaggcgctcaaggttcagcacgcccaaaccgtcgaggttgatcgggttcgcgacaccacctaccgccaggttctgaatgtgcggcgttttaccgcccagcagcgccacgacgcggttagcgtcacgctggcactccaacgcttgcaggtagtgcgctaccgcaatcaggttcacttccggcggcagtttcatcgccggatgaccccagtagccattagcgaaaatacccaactgaccgctggcaaccagatctttgatcttgttctgaactttggtgaactcttccggactgttcaggtgccaggtgctaacgcctttcagcatttcggaggctttggttgggtcagcttgcagtgcagaagtgatgtccacccagtccagcgcgctaagctgatagaaatgaacaatatggtcatgcgtggtgtgcgcagccagaatgatgttacggatgtattgcgcgttaaccggaacgtcgatattcagcgcactttctgccgcacgaacggaagacagcgcgtgagtggtagtacatacgccacagatacgttgcacaatcatccatgcatcgcgcggatcgcggtttttcacgatctcttccatgccgcgccacatggtaccggaagcccatgctttgctaacgacgccattttcgatttcgcaatcgatgcgtaaatgcccctcaatacgggttaccggatcaatagtaattctctggctcatgctttgctcgcctcatgacgattatgatcgttttgttttaaaggaggaagtatcggcagtagacgaatgagtacgatgtaagcgcaaatctcaatagccacaaaaccaatagaaatcaacagttcttcccaggtcgggaagtaggcgtaaccgccgcccgggttgaatgccaccaggctataggtcagacgccaggttgcacaacctaacagtgcgctcagtgcactcaggaacagcatgcgggaatcattacgcagcttcgccacacgcagaacgaccagcgggaagagcatcagcaggacttcaatccagaacatcacggagtagaagtcaccggcaaacgctaagctcagcttgtcgcgatagataagctcgccaaagcgcagcacgatgaaaatcgccagcaacacactgatggtgttggtcagcttaacaaacagactcttttcatccggaccgttgccacgcagacccgcctgcaccaggctaccttcaaagatgacaatgctgaagcccatgatgaacgccgtcagcaggctgaacagcggcaacatttcatagctctgccacaacggatgcaccttgtagcccgcgctgatcatcaggctccccatactagactggtgcatggtcggcagcagcgcaccgagcgcgatgatgaagaacatcaccttgtttagtcgctgtaggctcaccttccaccccagacgttcaaacagtgccggagcaaactccagtgccatcacgccgatatagatggtcatacagaccgccgtctcgaacagtacgctgttcacgttgaagtgacccggaatgtagaagtacggcaggttccagtagcgacccacgtcgatagtgatgctcaagccacccagactgtaaccaaacagactcgccaacagcgccggacgcaccagcggatggtattgcccacggttaaagacgtataccgcccacgccagcgcccagccgccacaggcaaagccggtgccaatcagcaggtcaaacgcgatccacacgccccacgggaagccgccgttcaggtcagagacagagcccagaccgaacaccagacgcttcacaatcaggagcatacagatgacgattaacggtccaaaaatcatgaccggtttactgatgattttgccgcccagcggttgtggatcatgactcatgatcgtctcctccgtcgtgattattcaactctcatgatcgtctcctccgtcgtgatggtcgtttttggtgttgcgacgaaccagcacggttaagcccgccagcacagccagtggtagcatcatgcctttatacagggtgtgttgaatattttcggaacgcgcaccggtagaaagatcgtccagtttcggcaggtcgagattttcataaggcacacccgtcagtaccagaacctgagtaccgccgccctctttctcgccgtacagatgcggataatatttcggcaccgtatgcaggtaagtgtcgccagatttcagcgtctgacgcggatagtggtattcgctgccaggcttcagcgccagacgttttttcgcctccgccatcagctcttcacgcgtaccgaaaatcaccgcgcccgccgggcacacttctacgcagccaggtagaccgcctttatcgagacgttccacacctttctggttgcacagctcgcacttatgcagcgcaccaaacgggttgttgtagtcgtacttcggcacgttgtacggacaggcgaccatgcagtaacggcagccggtgcacacatctttgtcgtaatggacaatgccggttttcggatcttttttcagtgcagagaccgggcacacagagacacagttcggatcgacgcagtgcatacactgtttcttaatgtacgcgtagccgttctcctcctggtctttgttgacccctgtgccgctggtccacacctgaatgatgttattggtatacgggctcagtttgtcgttgttgctccaggtctgttccccttgcgggttacgttcagggaaattgatatcctgacacttggtgacgcaagcctggcagcctacgcacaaggtgctgtcgtacaacatccccaggcttcccggaattggcgggcggttttcagcagccgcatgactgacagacggcagcgcgcccgtcagcaatgccccgcaggaggctgctttaataaaattacgtctgttcacggttattctccccgactgtcagcgttatctttcttttgctgacgacccagttcacgcaccgccatcacgctgacaccggcaaccaacccaaccacaccgccgagcaaaccaatagcgcctgcagagacgttgccgccctctttagcgttaacatccggtttctgactacgcggagtttgattttcgacgttggcaagctgatggatgcctttatggaagccgataccttcttcgttacagccatagcaagggtgaccaatcgccaccggccacacaccgccaacatcgcagaattgcagcgtactgcagttgccgtaagtttctggccctttacagccgaggtggtacaggcaccagccttcgcggtggccttcatcaccgaactctttggcaaaacgaccagcatcgaagtgcgggcgacgttcgcagtgttcgtgaatcagacggccataggcgaaggtcggacggtttttgtcatccagtttcggcggtttgccgtaagtgatgatgtgcgcaacggtcgcgaggaagttgtgcgggttcggcgggcagcccggaatattgataacggttttgcctggcagaacttcttgcaggctgactgcgccagttgggttaactccagctgcggcaacaccgccccacgcagagcaggaaccgatagcgataatggctgctgcgccttccgccgctttgcggatgtgatccacaatcggctcaccggcaaccatgcaataaataccgttatcttttaatgggatggaaccatccaccactaacacatactgccctttgtacttctcgagagcgttatgtttgttctcttcgacctgatgaccgaaggcggcggaaagcacttcgtgatactccagagagatagtctccagtacgaggttttctaccgttggatgcgttgcacgaagcagagattccgtacaaccggtgcactcctgcgcgccaatccagataactggcggacgctgcgggttagtaacgctttcggccatctctgcagcggctttgctacttaaccccatggtggcggctaatgctgcacaaagcttcatgaaatcacgacggttaatgccgtgagaatggatgagggtgttatctccagtcatttatagttattccgttgcgaagacctggcatatattttgcctcaatcgcaaaatcaataatgcgatcgatgcgccatttaccacacatttattatggttatcgatatcatgatactgcggcggggcgctaaaacgaagggaagaagcattagtgtaattaattaaagcaagataatacgtatgtttgatcaattttcgaggcgataaccggccataaaaaagcgcaacgtagaacaggaattattctcacgaaagaaatccattaccatctctttatccagtccatagcggcgcgtcagaatacccgcttcccaggcgctaagctggcgatctccggtcttttcgtacatccggtgactgtagcctaatacaaaaccgcgtttataatcggcacagaattttgtcacattaaccgcactgtcggcatgcgttgcttttaatcccgccattaagcctttaccaaaatggttattcatcgttcacctcattcgctatatattgtcatatatagcgatattttaggcaaagaacgacttttgcgcacgctattttttcatgcttgtttaagacgtaatcccgtaagagataaacctatcaggagagatatttatcgaaccatttcagtgtcctttgccaggcaagatcggcggcagatttgtcataacggggcgtggaatcattatggaatccgtgattaacccccggatagatatacgcctcataaaccttattattggctttcaacgccgcctcgtaagcaggccagccctcgttgattcgggtgtccagttccgcgaagtggagtagtaaaggcgcttcaatcttcgccacatcggcagtgggtgcctgacgaccataaaacggcaccgcgcaggccagttccggatacgcgacagccgccgcgttgcttacgccaccgccatagcaaaatccggtaatacccactttgcctgtcgcttgcggatagcgttgcataaactcaattgcggcaaagaaatcattcatcagtttgttggatcaacctgctgttgcagctcacgacctttatcatcatttcccggataacctccaacggaacttaagccgtcaggtgccagggcgatataccccgccttcgccactcgccgtgccacatcttcgatatacggattcagtccacgattctcatgcaccaccactacggctggcgttttgccgctcatctttgcgggcttcaccagataaccccgcacctcgccgtgaccatttgggctaggatacgtgatgtactcagcaacaatttccgggtcggtaaactctacctgagtcgccagcgcataatttggcttgagcaaatcaaacaacgctaatgccgtcatcccgcctaccgcacttcgccgcaaggttgaggaactcacgtttcgagattttcccgtgagcgtaatagtcatagtaatccagcaactcttgtgggaaatctttggcggttaaacgcggcatcgttgcactcctcagttggtgtttttttaagcaaagcataagcacgtatttttgcccagtttttcgtcactctgtgagccagactacgggatacgcgctggcgaatcgctaaactagaaacattgtttcgaaattgaacggtggaaaggagaggtcatggtctggttagcgaatcccgaacgttacgggcagatgcaataccgctattgcggaaaaagtggtttacgcctgcccgcgttaagcctcggtttatggcacaatttcggtcacgttaacgcgctggaaagtcagcgtgcgatcctgcgtaaagcgtttgatttgggcattacgcactttgatttagccaacaattacgggccgcctccaggaagcgcagaagagaactttggtcgcctgctgcgggaggattttgccgcttatcgcgatgaactgattatctctaccaaggctggctacgatatgtggcccggcccttacggctctggcggtagtcgtaaatacctgctcgccagcctcgaccaaagcctgaagcgtatggggcttgagtatgtcgatatcttttactctcatcgcgtcgatgaaaatacgccgatggaagaaaccgcctctgcgctggctcatgcggtacaaagcggtaaggcgctgtatgtcgggatctcctcttacagcccagagcggacgcaaaaaatggtcgagttgctgcgcgagtggaaaattccgctgttaattcatcaacctagctacaatttactgaaccgctgggtggataaaagcggcctgctggataccctgcaaaataacggcgtgggctgtattgcctttactcctctggctcagggattgctgaccggaaaatatctcaacggcattccgcaagatagtcggatgcatcgtgaagggaataaagttcgtggtctgacaccgaaaatgcttaccgaagccaacctcaacagcctgcgcttattgaatgaaatggcacagcagcgtggacaaagtatggcgcaaatggcgttaagctggttgctgaaagatgatcgcgtgacgagcgtattgattggtgccagccgcgcggagcaactagaggagaacgtgcaggcgctgaataatctgacatttagcaccaaggagctggcgcagattgatcagcatatcgccgatggcgagctgaatctgtggcaggcgtcttccgataaatgacctgttaataacgggcgcgcgaaccgcgcccgaatcagatcagtgattatgacgagtcagtcggtcaagatagcccatcacaaatgcagaaagcacaaacgtcagatggataatgacgtaccacatcagtttgttatccgggacatttttcgcatccataaagacgcgcagtaagtgaatggaagaaattgccacaatgctcgctgctactttgtttttcaggctcgttgcgtccattttccccagccagttcagcttctctttgttctcggagatatccagctgactgacgaaattctcataaccggaaaacatcaccatcaccagcaaaccgccaaccagcgtcatatccaccaggctcagcaacacgaggatcaaatcactttccgccatgctgaagatattcggcagtacgtgaataatctcctggaagaacttcagcgccagggcaactaacgccaggctaaggccaaagtacacgggggcaagcagccagcgagaagcatacattgcattttcaagaaaacgttccatacattcctgtcgtgtagttaaaacgggcaacagtatatcgcaattgagtaaacagcacgcaacagcaaatcaacatatacgttaaacctttgtcgcataattctgaggtttagggatcttcctggttcccttatcaacgcatcgagaacgtctacccttaaaggacgttgaacctgaagggagaaaaacgatgtctcatttaaaagacccgaccacgcagtattacactggtgaatatcccaaacagaaacaaccgacgccaggcatccaggcgaagatgacaccggtaccggattgcggcgagaaaacctatgttggtagcggtcgcctgaaagatcgtaaagcactggtgacagggggcgattccggaataggtcgcgctgccgccatcgcttacgcgcgtgaaggggctgacgtggcgatcagttatcttcccgtggaagaagaagacgctcaggatgtgaaaaagatcattgaagaatgcggacgcaaagccgttctgctgccaggcgatttaagcgatgagaaatttgcccgtagcctggttcacgaagcgcacaaggcgttaggcgggctggatattatggcgctggtcgccgggaaacaggttgccattccggatattgcagacctcaccagcgaacagtttcaaaagacctttgccattaacgttttcgcgctgttctggctaacccaggaagcgatccccctgctaccgaaaggtgcaagtatcatcaccactagcagtatccaggcataccagccaagtccgcatttactggactatgcggctacgaaggcggcgattctgaactacagccgtggcttggcaaaacaggtcgcggagaaaggtattcgggtgaatattgtcgcgccaggcccgatctggacagcactgcaaatttccggcggacaaacgcaggataagatcccgcagtttggtcagcaaacgccgatgaaacgtgcggggcaaccggcggaactggcccctgtatatgtttatctggcaagtcaggagagcagctacgtcaccgcagaagtgcacggcgtgtgcggcggcgagcatttaggttaaaaaaatgcccggttgtgaaaagcaaccgggcatcattgtgaattcactcttacctgatgtggcgaaaacgccttatccgcctacaaacgcatgaagattcaacatgttgcaatagattttgtaggcctgataagcgtagcgcatcaggcattgagcacctaatgccggatgcgtcgtgaacgccttatccggcctacaaacgcacgaagattcaacatgttgcaatagattttgtaggcctgatgagcgtagcgcatcaggcaattctactttacttcgctttggcggtttcttcgccgaccagacctatcttcaggtaacccgcctgatgcagcgtatccattaccttcatcaacgtctcgtaatcgacggttttgtccgctcggaagaagatggtggtgtctttcttgccttcggttaacgcattcaacgccgtaatcattgtttcatcggtgaccggatcgttaccgataaacatgctgttgtctgccttcacgctcagataaaccggtttttccgggcgcggctgcggcgtgctggtagaagcaggcaagttcaccttcacatctaccgtcgctaacggtgccgccaccataaagataatcagcagaaccaacatcacgtcgataaacggcgtcacgttgatatcatgcatttcgccgttatcgtcgaggttttcgttaagatgcattgccatcggatattatcctgcgcgtaatttttgtgcgacacgaaccggatgcgcagcggcgctggcttccagatccaggtcacggctttgcagcaacaatacctgcgctgcaacatcacccagcatcgctttaaagccgccaatctggcgtgcaaatacgttatagataacgaccgcaggaatcgctgccacgaggccgattgccgttgctaacagagcttctgcgatacccggcgcaacgactgccaggttagtggtctgcgtttgcgcgataccaataaagctgttcatgatgccccagaccgtaccaaacagaccaacgaacggagaaatcgcgccgatggttgccagatagccgttaccgcggcccatttgacgacccactgcggcgacccgacgctccagacggaagctggtacgttctttaataccttcgttatcgtcgctgccttcactcagttccagctcattctgcgcttcattgagcaaatgcaggcttaagcttttgctaccaaaatcagcggcgatatcgttggcctggtttaaggaacgcgcttcagccagcagttgctgctcgcgcttaaggcgacgcttctgattgaagaactctacgctcttactgaagaagattgcccaggtgactacggaggccaaaataagcccaatcatcacgcacttaacgacaatatcggcgtgctgatacataccccagacggaaaggtccgtctgcattaaattattacccactgtgtatctccaggacgcaagtcacaaaatctgcgcataataatatcaaaacgacgtcgaattgatagtcgttctcattactatttgcatactgccgtacctttgctttcttttccttgcgtttacgcagtaaaaaagtcaccagcacgccatttgcgaaaattttctgctttatgccaattcttcaggatgcgcccgcgaatattcatgctagtttagacatccagacgtataaaaacaggaatcccgacatggcggacaaaaagcttgatactcaactggtgaatgcaggacgcagcaaaaaatacactctcggcgcggtaaatagcgtgattcagcgcgcttctagcctggtctttgacagtgtagaagccaaaaaacacgcgacacgtaatcgcgccaatggagagttgttctatggacggcgcggaacgttaacccatttctccttacaacaagcgatgtgtgaactggaaggtggcgcaggctgcgtgctatttccctgcggggcggcagcggttgctaattccattcttgcttttatcgaacagggcgatcatgtgttgatgaccaacaccgcctatgaaccgagtcaggatttctgtagcaaaatcctcagcaaactgggcgtaacgacaagttggtttgatccgctgattggtgccgatatcgttaagcatctgcagccaaacactaaaatcgtgtttctggaaagcccaggctccatcaccatggaagtccacgacgttccggcgattgttgccgccgtacgcagtgtggtgccggatgccatcattatgatcgacaacacctgggcagccggtgtgctgtttaaggcgctggattttggcatcgatgtttctattcaagccgccaccaaatatctggttgggcatagtgatgcgatgattggcactgccgtgtgcaatgcccgttgctgggagcagctacgggaaaatgcctatctgatgggccagatggtcgatgccgataccgcctatataaccagccgtggcctgcgcacattaggtgtgcgtttgcgtcaacatcatgaaagcagtctgaaagtggctgaatggctggcagaacatccgcaagttgcgcgagttaaccaccctgctctgcctggcagtaaaggtcacgaattctggaaacgagactttacaggcagcagcgggctattttcctttgtgcttaagaaaaaactcaataatgaagagctggcgaactatctggataacttcagtttattcagcatggcctacagctggggcgggtatgaaagcttgatcctggcaaatcaaccagaacatatcgccgccattcgcccacaaggcgagatcgattttagcgggaccttgattcgcctgcatattggtctggaagatgtcgacgatctgattgccgatctggacgccggttttgcgcgaattgtataacattgccacttttggacaattttgcagacattttattgtgaaaagtcttaaattgttgcgtccgggatcaaggcgtcccggacgattcaggagtacaataggcagataaaggcttaaacgctgttccacaggaaagtccatggctgttattcaagatatcatcgctgcgctctggcaacacgactttgccgcgctggcggatcctcatattgttagcgttgtttactttgtcatgtttgccacgctgtttttagaaaacggcctgctgcccgccagttttttgccaggcgacagcttgttgatactggcaggcgcattgattgcccagggggttatggattttctgcctacgattgcgattctgaccgccgcagcaagtctgggctgctggctaagttatattcaggggcgctggttagggaataccaaaacggtgaaaggctggctggcacagcttcctgctaaatatcaccagcgcgccacctgcatgtttgaccgccacggtctgctggcgctgctggctggacgttttcttgcatttgtccgtacgctgctgccaaccatggcgggaatttccggtctgccaaaccgccgcttccagtttttcaactggttaagtggattgctgtgggtcagcgtggtaaccagttttggctatgccttaagtatgattccgttcgttaaacgccatgaagatcaggtaatgacgttcctgatgatcctgccaattgccttgttaaccgctggcttgttaggcacgctgtttgtggtgattaaaaaaaaatactgtaacgcctgacgattttccccgttcccggttgctgtaccgggaacgtatttaattcccctgcatcgcccgcattcttgccgcatcttcccccggcgtcacaccgaagtaacgtttaaactcacggctaaattggcttgcgctttcatagccgacgcgcatcgctgctgcgctggccttcatgccgtcatggatgatcatcatccgcgccttatgcagacggtaattcttcaaatactgcaacgggctggtactggtgacagacttaaaattatggtggaacgcgcttacgctcatgttggcttctgccgccagttgctcgacgctcaggttttcggtgtatttattctcaatccgtttcagcacgcggctaatcagactgaagtgagtctggcgactgaccagcgccagtaacgcgccgccgcaaggtccggtcagcacgtagtacagaatttcgcggatgatctgtttgccgagaatacgcgcatccagtggtcgctccatcacgtcgagtaaccgctccgccgcgcataaaatctcttcacttaacgtggcggagttaatcccgctggctgccatgctcggctggaaatgctcatcttcgccaatgtccatcaacagttcctgtaactgcaaaatatcgacattgagacgcaaccctgccagcggcacctcactcgtggcataggtttcgcactcaaacggcaacggcaccgtcagcagcaggtattcattggcatcataacgaaacacgcgttcattgatataaccgattttatgcccggaaaagagaattatgatgccaggctcgtacatcaccggtgtacgtgcgaaaggcgtctcgccatacaacaaacgcacatcgggcaacagtccactcaaactattttctttatttttcagtttattaactttatccgccagcaagcggcaaatctcttcacgtttcatatcgcgtaatttcttaggaataatgcggcaattactttgtgcgcaattttgtagcatttctccagcactctggagaaataggcaagacattggcagaaatgagcattgagagccagggcgctggcgatcacaatgaaaaacatcaggcagatcgttctctgccctcatattggcccagcaaagggagcaagtaatgaacaactttaatctgcacaccccaacccgcattctgtttggtaaaggcgcaatcgctggtttacgcgaacaaattcctcacgatgctcgcgtattgattacctacggcggcggcagcgtgaaaaaaaccggcgttctcgatcaagttctggatgccctgaaaggcatggacgtgctggaatttggcggtattgagccaaacccggcttatgaaacgctgatgaacgccgtgaaactggttcgcgaacagaaagtgactttcctgctggcggttggcggcggttctgtactggacggcaccaaatttatcgccgcagcggctaactatccggaaaatatcgatccgtggcacattctgcaaacgggcggtaaagagattaaaagcgccatcccgatgggctgtgtgctgacgctgccagcaaccggtagtgaatccaacgcaggcgcggtgatctcccgtaaaaccacaggcgacaagcaggcgttccattctgcccatgttcagccggtatttgccgtgctcgatccggtttatacctacaccctgccgccgcgtcaggtggctaacggcgtagtggacgcctttgtacacaccgtggaacagtatgttaccaaaccggttgatgccaaaattcaggaccgtttcgcagaaggcattttgctgacgctaatcgaagatggtccgaaagccctgaaagagccagaaaactacgatgtgcgcgccaacgtcatgtgggcggcgactcaggcgctgaacggtttgattggcgctggcgtaccgcaggactgggcaacgcatatgctgggccacgaactgactgcgatgcacggtctggatcacgcgcaaacactggctatcgtcctgcctgcactgtggaatgaaaaacgcgataccaagcgcgctaagctgctgcaatatgctgaacgcgtctggaacatcactgaaggttccgatgatgagcgtattgacgccgcgattgccgcaacccgcaatttctttgagcaattaggcgtgccgacccacctctccgactacggtctggacggcagctccatcccggctttgctgaaaaaactggaagagcacggcatgacccaactgggcgaaaatcatgacattacgttggatgtcagccgccgtatatacgaagccgcccgctaagctttttacgcctcaaactttcgttttcgggcatttcgtccagacttaagttcacaacacctcaccggagcctgctccggtgagttcatataaaggaggaacgtatggctaatccaaccgttattaagctacaggatggcaatgtcatgccccagctgggactgggcgtctggcaagcaagtaatgaggaagtaatcaccgccattcaaaaagcgttagaagtgggttatcgcagcattgataccgccgcggcctacaagaacgaagaaggtgtcggcaaagccctgaaaaatgccagtgtcaacagagaagaactgttcatcaccactaagctgtggaacgacgaccacaagcgcccccgcgaagccctgctcgacagcctgaaaaaactccagcttgattatatcgacctctacttaatgcactggcccgttcccgctatcgaccattatgtcgaagcatggaaaggcatgatcgaattgcaaaaagagggattaatcaaaagcatcggcgtgtgcaacttccagatccatcacctgcaacgcctgattgatgaaactggcgtgacgcctgtgataaaccagatcgaacttcatccgctgatgcaacaacgccagctacacgcctggaacgcgacacacaaaatccagaccgaatcctggagcccattagcgcaaggagggaaaggcgttttcgatcagaaagtcattcgcgatctggcagataaatacggcaaaaccccggcgcagattgttatccgctggcatctggatagcggcctggtggtgatcccgaaaagcgtcacacctagtcgtattgccgaaaactttgatgtctgggatttccgtctcgacaaagacgaactcggcgaaattgcaaaactcgatcagggcaagcgtctcggtcccgatcctgaccagttcggcggctaacatgcaaattctcccggtggcggtaatgttccgctaccggacttttcagaaatcatttattcccctcgcgtcccgcccgttgttactcttccttgttcaggaatgccaaatataaggacatcatcatgcagagccggaagctcttaaaagaacaactcatctatatccgggataaacgcaacggagaggtgaaaaacagatgaaaataatacttctgtttttagcagccctggcaagttttaccgtacacgcacagccccccagtcagaccgtagaacaaacagtccggcatatttatcagaactataaaagtgatgccactgccccttattttggtgaaaccggagagcgggcgataacttctgcgcgtattcaacaggcgcttaccctgaacgacaatcttacgctgccgggcaatattggctggctggattatgatccggtttgtgattgtcaggattttggcgatctggtgctagaaagcgttgcgataacccaaactgacgccgatcatgccgatgccgttgtgcgctttcgtatctttaaagatgataaagaaaagaccacgcagacactgaaaatggtggcggaaaatggtcgttgggtcattgacgatattgtcagcaatcatggcagcgtcttacaagcagttaatagcgagaatgaaaaaacgctggccgctttagctagcttgcaaaaagaacagccggaagcctttgttgccgaactctttgaacatattgctgattatagctggccgtggacgtgggtggtttccgactcttaccgccaggcggttaatgccttctataaaaccaccttcaagacggccaataatcccgatgaagatatgcaaatagaacggcaatttatttacgacaatccgatctgttttggcgaagagagcctatttagtcgcgttgatgaaattcgagtcctggagaaaaccgccgattccgcccgcattcatgttcgttttacgctgaccaatggcaacaacgaagagcaagaactggttttacagcggcgcgaaggcaagtgggaaatcgctgattttatccgcccgaacagcggcagcctacttaagcagattgaggcaaaaactgccgccagattaaagcaatgagctgaattaaataacaattagccggaacaataaataaaagggaacactatatgaaaacgattttcaccgtgggagctgttgttctggcaacctgcttgctcagtggctgcgtcaatgagcaaaaggtcaatcagctggcgagcaatgtgcaaacattaaatgccaaaatcgcccggcttgagcaggatatgaaagcactacgcccacaaatctatgctgccaaatccgaagctaacagagccaatacgcgtcttgatgctcaggactattttgattgcctgcgctgcttgcgtatgtacgcagaatgataaaaaaatccccggtagcgtgtcagttgccggggatattttttaacgtccaaccgccgctttaggccgtttcttcgcaccagcattcaccggacgagattgcgtagagctcgctttttttgccgtagcaggcgtctgacgctgggtcgccatcggcgtatgtttcgtcaacgccggacgggtattgcggttctggcgacgagcttcacgcatctcttcaatggttggcgcaggcactaagcaatcgcgacggctgccaatcagatgctttttgcccatcgcttccagcgcctggcggattaacggccagtttgccggatcgtggtaacgcaacaacgctttatgcaaacgacgctgtttgtcgcccttcggtacgaagacgtcttcgctcttataaccaatcttcgccagcgggtttttcccggtgtaatacatggtggtactgttcgccagcgggctcggatagaagttctgcacctggtcgaggcggaagcggtgctttttcagccacagcgccagattcaccatatcttcatcacgcgtaccggggtgcgcggagatgaaataggggatcagatactgctctttacctgcctgtttactgtaagtatcgaacagctctttaaagcggtcatagctgcccatgcccggcttcatcatcttgcttaacggcccttcttcggtatgttccggggcaatcttcagataaccgccgacgtgatgggtcgccagttctttgatatagcgcggatcttctacggctatgtcataacgcacaccagaggcaatcaggatctttttaatgcctttcagatcacgcgcacggcgatagaggttgatcgttggttcgtggttcgtgtccatgtgcggacaaatatccggataaacgcagctcaaacggcgacaagtttgttcagcgcgtgggcttttgcagcgcaacatatacatgttggcagttggcccaccaagatcggaaatcacgcccgtaaaacctggaacggtgtcgcggatcgcttcgatctcattaatgatgctatcttcggaacggctctgaataatgcgcccttcgtgctcggtgatagaacagaaagagcagccgccaaagcagccacgcataatgttgacgctaaaacggatcatttcgtaagccggaatacgggcattgccataggccggatgtggcacgcgcttgtatggcagcgcaaaaacgctgtccatctcttcggtagaaagcggaatagcaggcgggttgatccacacatagcggtcgccgtgtttttgcatcaatgcgcgggcacagcctgggttggtttcgtggtgcagaatacggctagcatgggcgtacagcactttatcgcccttcactttctcgaaagaaggcagcaacacgtaggttttttcccacggtttcgggcgcggtggctgcacggttacggctttggcttcctgctttttcggtgccaccggtttgttatccgcgcacggcaaatcttcaccatacggatgcgggattgggtcgatttttccaggggtatcaagacgggtggaatccacgccgctccagccaggcagcgcctctttcacgataatcgcggtattacgcacatcgcggatttcactaattggctcgcccatcgccagacgatgcgccacttccaccagcggacgctcaccgttaccaaacatcagcatgtcggctttgctatccaccagcacggaacggcgcacggtatcggaccagtaatcataatgcgcggtacggcgcagactagcctcaataccgccgaggatcaccggtacatctttccacgcctctttacaacgctgggtataaaccagtgtggcgcgatccgggcgcttacccgcgacgttatccggcgtgtaggcatcgtcatgacgtaaacggcgatcggcggtataacggttgatcatgctatccatgttgccagcagtaacaccgaaaaacagattcggtttacccagacgcataaagtcgtctttgctgctccagtccggctgggcgatgatcccgacgcgaaagccctgcgcttccagcatacgaccgcaaatcgccatcccgaagcttgggtgatcgacatacgcgtcgccagtaaccaaaatgatgtcgcagctatcccagccaagttgatccatctcttcacgagacatcggcaaaaacggtgccggtccaaaacaggcggcccagtactgcggccaggagaacaggtcgcgatccggttggatcagggagatagagctcattttgcttccagaaatgataaaaaaataatcaaaggccggggattataagccggaacgaaagagaaatcgaaaggtattccatactcgccctcctcgggcgagtatgaagattacggtaccggattgaccaacagttgcccaatgctgccacggtccgccatttccagcgtctgactgttgaagtagaacgggaagtgcgcccaggaaggctgaccgaaataaacaagcagctccacttgtccgtcaacccaaacggtatctttccagcctctgtcttccgggaacggcatcgcgccattcacgttacggatctggaacattacgccttcaatatggaacgcttgcggctcgtccgcgcgtaccgtccagcgttcccacgttccttgctgcgcggtgacatcaatacggttgacgtcccacagctgtccattaatacccgggtcatcacccagactgatatcgcgactgcgaattgggctaccagccatgatttcagttggcagcaagcgcatcggaagactgtctgtgaccagcggcagaaggccggttgggcgcagcgttagcaccagggtagaaaccagaatactggatggctcaaagaagccacgaatacgatcaacaatgctcgccgcttcgccacaggtgatgctcacttcatcgccgttgctcatatccaccagaatctcgcggcgctcgcccggtgccaggctaagttgcttcacgcttacaggagcaggcaggaatccctgatcgccagaaatcacatgtaacgggcgaccatcgttcatctgtagttgatagcgacgagagttgctcgcgttcagcagtcgcaagcgcacccagccacggctgacttcaacgtacgggctttgtacaccgttaaccagcagcgtatcaccaacaaagccgccgcttcccggttcgttgtattctggcgtaccaaagttatccagccgtttatcctggataatgaccggaaaatcatccacaccataatggttggggataggcaggctcttgctgacttcatcttccaccagccacattccggcaaggccgttatagacctgctgagccgtgcggttgggagtattggcgtgataccacagagtagctgcgttctggcgaatgggcagtacgggtgcccagtcagcgtttgggctcatcatccgtgccggaccgcccatcagcgggcctggtacctgtagcccggccaccgtcatactgacattttctgtcaggcggttgctgtaaataagcttaacatcgtcgcccttccagacgcggatagtcggccccaggtaacgaccattgattccccagacgctcgcgcgtgtccctggcgtaaaactccagtgcgcacgttgtacagtcataaacagcggttgcccacggcgagattcaagtagcggcggaacgggtagcggttgctgttgcccggctgcgctggccttcaggggaacagcgcctgcacaaagtgcaatcccgcttgcctgaatgaactgacgccgactgagactcatatttgctccatgtaaaactggctaaagtaataccgtgcaggaaagtgttccccgcaaaaatacagattgccgacttaaacttttccggcggcttcgcgttctgcgacttctttatcgagctcggcgattttttgttccattatgctacgacaatgggcagccagctcacgaacctgatctttgccatactgactgacgtcaattggcggcagcatttcgacaatcaccagaccgttgtgcagtcgattaagattaatcttattgctagttgtagagacgcacacgggaataatcgggacgcccgccgcaattgccgcgtgaaatgctccagtcttgaacggtagcaggccgcgaccacggctgcgggttccttccgggaacatccagatggaaatacggcgttttttgaagtgattcactacttccgcaatggtgccgtgagctttagtgcgattgtttctgtcgatcaataagttgccggttaaccagtacaactgcccgaagaaggggatccacagcaagctctttttacctaccgtcaccgtcggcggttgcacgatgttgcttgctgtcaccatgtcatagttgttctggtggttagcgatatagatagcattgccgtagctttcagcgtctgtaggtttacggcactcaactttcaggccaaacagcggcgcaagacggccaaacatatgcccaaaggtggccacatgtttcgggttacgcgggctgaaaaggcagtaaatggagccgaatacacagactaagatgctgtaaatcacggtaataataagacgaaagatatatagcataacaccctctgaaggtctgagagactggcattgtacgtcacctgaaatcaggttagggcattgttaaaagccgctctctggaaaagcgtattgttaatcgcaacgcatgaataaacaacggtttcaagggaatttttatcgtttccgggggttgaatacgctgccggatgacgacttaacgtttcatccggcgttccttgcaagcgggaggaaacagcgccctccccggcatattactcttcgctatcaccgctgctggcacggcgaggagagtcgatctcaacacgatcgatacgctgcaaaccgcgcatcaacgtaccgcggcgtccacgttcgccagtgactttctgtaactcttccgggcgcagtttaattttgcgtttcccaacatgaatggtcagcgtgctttgcggcggcagaacgtacaattgcgccagaccatcttctccacgcgcggcttctgcgcttggaatgttgataatcttgttgcctttgcccttgctcagctgcggcagatcacttaccgggaacatcaacatacggcctgcctgagtgattgccagcagcatatcggaagcatcttcaatcaccaccggcggcataacatgggcattttccggtaaggtgatcaaagccttacctgcacggttacgcgccaccagatcgttaaaggtgcagacgaaaccgtaacccgcatcggaagccatcagcagtttctgatcgtcgctttccatcagcatatggtcaacggtcgccccaggcggcaacgttaatttgccggtgagcggctcgccctgaccacgcgcgctcggcagcgtaatcgggtcaatggcatagctacgaccggtggaatcaacaaacactaccggttggttgctcttacctttcaccgccgctttgaagctatcacccgctttataattcaggcccggcgcgtcgatatcatggcctttagcgctgcgtacccagcccatctggctcagcacaatggtgacaggttcagacggcagcatgtcgtgctcgctcatcgctttcgcttcttcgcgttcctgcaacgggctacgacgatcgtcaccgtaggcttgcgcgtctgcctgcagttctttcttcagcaggttattcattttacgctcggaagccaaaatgccctgcaactggtcgcgctctttttccagttcactctgctcaccgcgaatcttcatctcttccagtttggcaagatgacgcagtttcagttcgaggatcgcttccgcctgggtttccgtaaggccaaaccggctcatcagcgccggtttcggttcatcttcattacgaatgatctcaatcacttcgtcgatattgagaaacgccaccagcaaaccttcgaggatatgcaggcgcttgaggactttctccagacgatagttcagtcggcggcgcacggtatcgcggcggaacaccagccattcggagaggatttccagcaggtttttcaccgccggacgaccatccagaccgatcatattaaggttaatacgatagctcttttccagatcggtggtagcgaagaggtggttcatcacctgatccatatccacgcggttggaacgcggcacaatcaccaggcgggtcgggttctcgtggtcagattcatcgcgcagatcgtcaaccatcggcagctttttgttgcgcatttgcgcagcaatttgctccagtacgcgcgcaccactaacctgatgcggcaatgcgctgataaccaccgcgccatcttctttcttccacaccgcgcgcatacgcacactaccacgtccgttctcgtagattttacggatctcggcgcggctagtgataatttccgcttcagtcggataatccggcccctgcacgatatccagcagctgatcgagcgtggttttcggctggtcgattaatgcgattgccgcctgagccacttcacgcaggttatgcggtggaatatcggtcgccatgccgacggcaataccggtggtgccgttaagcaaaatgtttggcagacgggcaggtagcattttcggctcctgcaaagtgccgtcgaagtttggcacccagtcagccgtcccctgccccagctcgctcaatagcagctcggaatatttgctcaaccgggattcggtgtaacgcattgccgcgaagcttttcggatcgtccggcgcgccccagttcccctgaccatcaaccagcggataacggtaagagaacggttgcgccatcaggaccatcgcttcataacaggcgctatcgccgtgcggatggtatttacccagtacgtcaccgacggtacgggcgctttttttaaatttggcgctggcattcaggcccagttcagacatcgcatacacaatgcggcgctgaacaggtttcagaccatcaccaataaacggcaacgcacggtccatgatcacgtacatggagtagtttaagtaggcgttttccgtaaattcatgtagcgcaaggcgctctgccatatcgctcattaattctgattcctcaacttattcgccagccttcaaaggggcaatattgccggagatactacattatctgccgcgtcgagtcacaggagatcaacgtgaatagcgccgccggacgtgctccgacggcgataaaggcatcaatgtgccttgatatacaactctttgctgtagacataatcctggggattatgcagcggaaaaccgccaacgtagggtttaagcagtttgattaacggctgatagtagataggaatcagcggtgcctgttggttgatgatcacttctgcctgctgatacaacgcattacgctttgtcgcatcagtgatctgcgtggcctggtttagtaaggcgtcatactgcgcatttttccagtgaccgacgttttcttcactatcgcttttgagcgtgttcaggaagctggaagcatcattgtacgtcgcatcccagctctgccgagacagcatgaaatcaccggctcgtcgggcatcaagataggttttccactccattgtgcgcagcgtcacctgtgcacccagccattttttccattcggaagacaacgctatcgcggtcttttcatgcagatcgtacttgttgtagaacagctcaaagcgtagcggatgagaggcgtcgtatcccgcctgtttcagcaaggcttttgccatcgcgacgcgctcactcattggcttttgcagttcatcgaacgtcgtcgcgctaaagccttttacctctggcggcgtcagcgtggttgcgggcgttctcaaccccagtaccttttgcgcaataagctgtcgatcaaccgtaagatatagcgcccgacgcactcgcacatcgttaaatggcggtttctcaaggttgaagttgtaatattcgctgttcagacgcggaataattcgtagctcgccaggcagacttttttcaatggcgggaatttgctgcgccggaacccaggtgagatcgacctctcccgcgcgatagcggttatagccggtgacgctattatctagcgccagatactcaacctgttgcaatactgtatgttgcgcatcgcggtactttggatttttgcgtgcagtaatcttttcgttaactacccactgatcaagcacaaaggcaccgttgtaaaccatgttctctggcttactccagctatcgccatgtttagcgatgacatgatgaggaaccgggaacagcgtcggccaggcgagcatcgtcgtgaaccaaggaaccggctgctcaagcgtaacttcaagagtacgatcatccgtcgctttgacacccaggcttgtaacatctgctttacccgcaacaatagctgcggcattgttaatgtgcgcctgtgccagatagccagcaaaagggcttgccgttttcgggtcaaccgcgcgctgccagccgaggacaaaatcctctgccgtcagaggctgaccgtcggaccactgcaaaccgctacgcagatggaaaatatagcgcttgccgccgtccagtatctcccagcgttcagcctgagcgggctgcacctggccttcaccgtccatccataccagaccttcaaacagatccagcacaatctgcgcggcagtattctcctccaccttttgcgggtcgagcgtacctgggtcgctatgattgttgtaacgaaagacttgttgcggggcgagcggtgtgttggcgggaacgtcagcagcgtagagaggagccgcacttaccaggctgaccagccataataaatttcgcgtatacatggtattccttaccggagaaattataagcccaacaacaatacgcctgtggcattgttcgctcaaacttatcgcgagtgatttggctcacactccggtaaagaaaaaagcgagttgcccccgcttttccattaattaacggatttcattcaatagttctggatgcttatccagaacacgtaaaagtttgattgtggaaggatgaggttgggcattgcctttttcgtaacggctaaacgcatttacacctcccccaaaaatttcgcttgcctctttttgggtaagagagagcttttttcgaaccttcactataaattcaggtgccactgtttcggcattcacgctagcccgaaatgcctttacttgcgccatgaaagcatcactctcttctttattcatgatgctctcttcgcaatggacacaatataaaccgtggatacctttcaatactgtttttcgtccacggaaggtgtatggaatatctttaatgccagaaaccatttctccctggtggcaaaccggacatttcatattacttctccttaaagctgacgatcagtacgtcatgaattaccgtaattttaagataaacctggcctgtaacaagcctgggtctgtaaacatcctgccagatagtatgatcagagtaggtggtcatgcttttataaaagtcgctctcacttaatccaatgataacattacacataccatcaaaatccaaacctaactcatctgcatttaacagggcactacgtgttgtacgaacttgcccggcattgacaagttttttaacctgactcaaacgtgtatgtggtgtgcgtttttccataacccccgcctccctgttactttagttataacctaaaaggttaattacagcaatgaaaaagcacctaaaaggttagttagatgtacggagatagtgaccacacaaaacgtattctttaaggaaagtgattgaccatataagaaagtggcgcattagtagcgccagtttgaagcaggaatttataagggaagctggagtcaggcatcacgccaacggcacataaacatccgtttccagtcgctgctctgtcaccccttcggcaagattggtgtagtgaaacagaatcggtgctttacgcattttctcgccgcttgcaggcagccagtggcgaatgatgccccataccgtgtgactaatatcgtccagctcgccaacgtggcgggccacggcataacgtccaccggtaagttcaccattgctcacaccataacgattatcgggaatcggttcgctaacgctgccgcagatatcaaagcgaaacgcttccggtgcggtggtggcagggtcgtcccaggcgacgccaaaagtctggctttggttaacaggagaaagccccgtctctttacgccacatgataaatttcgccacgctgtagttgagcaattcagggctacagcggtgcggcaacatcgccacaggtatacttgggaaatcgataatgtttacatccagtgtcaggtttgtcattttgcctccctgcgaaattattcccgggaacgcgtcccgggagcggtaacaattacggatttactttgcggatctgtttgacgtcaatttcaacagaattccagtctttatcgacttcaccctgaatctcaaccgtatctttcggcgtcaccgtcacgccgttccagcgtttgtggtcgatatcaacattgatagtaccgctggcatctttgaacacgtagagatcgtcagagatgcgttcaacgatattgccgcgcagggttacccaggtgtcgtcacgcagggattttgcgctttctacagtcgttacgctgccgttcggcccctggaatcctccggcctgactttgcgttgcgcttgggccagaaaaaccgccctgctctgctgccatcaccggtgcgctgcacagggccattactgcgattactgctgcgaattttttcatgtttattactccctttaatgtctgtttccgagcatttaacaagatagtccttaacaacttcttaagggaaaaaaataaaatttagtgctgtacagagcgcgttacaacacggtttactggcagcaaatacggttatcgcagggatgaaaaaatgcgaattttactgatagaagatgacatgctgattggcgacggcatcaaaacgggccttagtaaaatgggttttagcgtcgactggtttacacaaggtcgtcagggaaaagaggcgctttatagcgcaccttatgatgcggtgatcctggatttaaccttaccaggcatggatggtcgcgatattttgcgcgaatggcgagaaaaaggtcagcgtgagccggtactgatcctgaccgcgcgcgatgcgctggcggaacgtgtagaagggctgcgtctgggagctgacgattatctgtgtaaaccttttgcgttgatagaagtcgccgccaggctggaagctctgatgcgccgaaccaacggccaggccagcaacgagctgcgccacggtaacgtcatgctcgaccccggcaaacgtatcgccacgctggctggcgaacccttaacactgaaaccaaaagaatttgccctgctggaattactgatgcgtaacgctggtcgggtactgagccgcaaactgattgaagagaaactgtatacctgggacgaagaggtcaccagtaatgccgttgaagtgcatgtgcatcatctgcgacgcaaactcggtagtgattttattcgtaccgtgcatggtattggttacacattaggtgagaaatgaaatttacccaacgtcttagtctgcgcgtcaggctgacgctaatctttttaattctggccagcgtgacctggctgctttccagctttgtcgcctggaaacaaacaacggataacgtcgatgaattgttcgacacccaactgatgctgtttgccaagcggttaagtacgctcgatctcaacgaaatcaacgcggcggatcgcatggcacagacgccaaatagattaaaacacggtcatgttgatgacgatgcgctgacctttgccatctttacccacgacggcagaatggtccttaatgatggcgataacggagaagatattccctatagctatcaacgggaaggttttgctgacgggcaactggtcggtgaagacgatccttggcgttttgtctggatgaccagtcctgatggcaaatatcgcatcgttgttggccaggaatgggaataccgtgaagacatggcgctggcgattgttgccgggcaattgatcccgtggctggtcgcactgccgattatgttaatcatcatgatggtactactgggtcgtgaactcgcgccgctgaacaaactggcgctggcactacgtatgcgtgaccctgacagcgaaaaaccactaaacgcgactggcgtacccagcgaagtgcggccactggttgagagcctaaatcaactgttcgcccgcacacatgcgatgatggttcgtgaacgacgctttacctccgacgcagctcacgaacttcgtagcccgttaacggcgctgaaagtgcaaaccgaagttgcgcagctctctgacgatgatccgcaggcgcggaaaaaagcactgctccaattacattccgggatcgatcgcgctactcgtctggttgatcaactgctcacgctaagccggctggacagtctggataaccttcaggacgtcgcggagatcccgcttgaagatctcctgcaaagcagcgtgatggatatttaccacacggcgcagcaggcgaaaattgacgtgcgactgacactcaatgcccacagcatcaaacgcaccgggcaaccgctattgctaagtttgttggtgcgaaatttgctggataacgccgtgcgctacagtccacagggcagcgtggtagacgtcacgctgaatgctgataatttcatcgtgagggataacggccccggtgtgacaccagaggcactggcgcgaattggcgaacgcttctatcgcccacccggacaaaccgctaccggcagcgggcttgggctaagcattgtccagcgaatcgccaaattgcatggcatgaatgttgaatttgggaatgcggaacaaggtggatttgaggcgaaggtaagctggtaacttctctgtctatgagagccgttaaaacgactctcatagattttattaatagcaaaatataaaccgtccccaaaaaagccaccaaccacaaaccagacaaataccgaggctgaatacatatacccaaaactcgaacatttcccgcataaagagttttcttaagataagaataataagtggcgtaagaagaaaaaatgctgcaatcattgcttgcaatatacgatcttcgccactaacggaaggtatactgcaaatatttcctccgctctcaagcatccagtcatacttattgaaagcaaaaaaagaatctattaaccaataagtaagcattatatatagcaatgcttcaaatattgttttaattttctgctttaacatatatcagtacgctcataaaaatccatttataattatcaacatgacacgttgatactttcatcttttacttattcaaagccatattttcaatccccaaaaaaaccgaaccaaacgtgtaaattattccggtgcgagtaagaattatgaggaatggctatcagtattgtcattttcagaaaatatttatcctgcatcggtgagtcagagtaagatcagacttttgctaaattcgcaaaagactttgcacattttgctaatttcaccgtaccgctctgtgacgtactatagtcggcaaacgtctcaccttgaggttaaaaaatgagcaacatcctgattatcaacggcgcgaaaaaattcgcccactccaatggtcaactgaacgacaccctgaccgaagtcgcggatggcacactgcgcgaccttgggcatgatgtccgcatcgttcgcgccgacagcgactacgatgtcaaagcggaagtacaaaactttctctgggctgatgtggtgatctggcagatgccaggctggtggatgggcgcgccgtggacagtgaaaaaatacattgatgatgtattcaccgaaggtcacgggacgctgtatgccagcgatggtcgtacccgcaaagatccgagcaaaaaatacggttccggcggcctggtacagggcaaaaaatatatgctttctctgacctggaacgcaccaatggaagccttcaccgaaaaagatcagttcttccacggcgttggcgttgacggtgtgtatctgccgttccataaagcaaaccaattcctcggtatggaaccgctgccgacatttatcgctaatgacgtgataaaaatgcctgatgttccccgctatactgaagaatatcgcaagcatcttgtggaaatttttggttaactagagctcaggctttagaaggagttaaccatgcttaccgtaatcgcagaaatccgtactcgtcctggtcaacatcaccgtcaggcggtattggatcagtttgctaaaatcgttccaaccgtactgaaagaagaaggttgccacggctatgcgccaatggtggattgcgcagctggcgtgagtttccagtctatggcaccggattctatcgtgatgattgagcagtgggaaagcatcgcgcatcttgaagcgcatctgcaaaccccgcacatgaaggcgtatagcgaagccgtaaaaggtgacgtgctggagatgaatatccgtattctgcagccagggatttaatcctgccttgtttgcccggccatcctgaccgggcaatgttctttcctttaaacctcaatctccgccatgtcgcctttctcttgcaaccagttgcggcgatcttcgctgcgtttcttcgccagcagcatatccatcatcgcgtcagtacgctgatcgtcttcatcatcgatagtcaactgcaccagacgacgagtgttcggatcaagcgtggtttcgcgcaattgcatcgggttcatttcccccagacctttaaaacgctggacgttcggcttgcctttcttgcgttttaattgctcaagtacgccctctttctcttcttccgtcagcgcgtaataaacctctttcccgagatcaatacggtagagcggtggcagtgcgacgtaaacgtgaccgtgtttcaccaacgcgcggaaatgttttacgaacaaagcgcagagcagcgtggcaatgtgcagaccatcagagtccgcatccgcgaggatacagattttgccataacgaagctggctcagatcgtcgctgtcaggatcgataccgatcgctacgctaatatcgtgcacttcctggctagccagcacttcgtcggaagagacttcccaggtgttaaggatcttacctttcagtggcatgatcgcctgatattcgcgatcgcgcgcctgcttggcagatccgcctgcggagtcaccttccacaaggaacagctcggtacggttaaggtcctgcgcggtacaatcagccagtttgccaggcaacgccgggccgctggtcagctttttacgcaccacttttttggccgcacgcatacggcgctgggcgctggaaatcgccatctccgccagcagttcagccgcctgaacgttctggttcagccacaggataaaggcatctttcaccacgccagaaacgaatgccgcgcattgacggctagagagacgctctttcgtctgcccggcaaactgcggatcctgcatttttacactcagcacataggcgcagcgatcccagatatcttccgcgctcagctttacaccgcgcggcagaatattgcggtattcacagaactcacgcatcgcgtccaacaggccctgacgcagaccattaacatgggtaccgccctgcatcgttgggataaggttgacgtagctttcggtcagcagttcaccgccttccggcagccacagtagcgcccagtccacagcttcagtatcaccagcgaaattaccgataaacggtttttccggcagcgtcggcagaccatttaccgcttccgccaggtaatcattcagaccgtcctgatagcaccagcgttgttcggtattgttgatctcatctttaaaagtgatctcaacgccagggcacaataccgctttggctttcagcacatgcgtcaggcgactaacagaaaatcgcgggctgtcaaagaaggtttcatccggccagaagtgcacactggtaccagtattgcgtttaccgcaagtgccgacaacctgtaaatcctgcaccttttcgccattttcaaaggcgatgttataaacctgaccatcgcggcgcacgttaacttctacgcgcttgctcagggcgttaaccacgctaatccccacgccatgcaggccgccagagaactggtaatttttgttagagaatttaccgcctgcatgcagacggcaaagaatcagttcaaccgccggtacaccctcttccgggtgaatatccaccggcatcccgcgcccatcgtcaataacttctaagctctggtcagcatgtaaaataacgtccacgcgttttgcgtgacccgccagtgcttcatccacactgttatcaatgacttcttgccccaaatggttagggcgagtggtatcggtatacatccccggacggcggcgaaccggctcaagcccggtgagtacctcaatggcatcagcgttataagtttgcgtcatggtttaagttagtaattcgagttgatcgtcagagatggtgcagaccaagaaaatcgacgatcgggttgaaataatcttcgaagcccgtgaatgcgtggttgccgccttctatgacagtctggcggcaggaagcgtagtacgccaccgcctggcggtaatccagcacttcatctcccgtctgttgcagcagccagatcaaatccggcgcttccagcgggtcaatctgcatgactttaagatcgtaaatatggcgactctctagcacatattgctgcccggtgtaggggttctcgttctgaccgagatagtccgtcagcagttcaaacgggcgcaccgccgggtttaccaccactgcgggcagcataaaacattgactcaaccaggtggcgtaatatccccccagactgctaccgacaatacccaggctatcaccgccatgttccaggacaatggattccagcagctctgccgcgtcggaaggatacggcggcaactgcggaatgatcatctcaacgtcagggtgatgttccgccagccagttttttaacaagctcgcttttgcagagcgcgggctgctgttgaaaccgtgtaaataaagaagcgtagacatcagtagccttcactagcggtatcaggttggaaacgtgtgtccgccaggcgatgcacctcggtggtcagcgtgccatcagcatgtaactcgagagtacgccagccgggcgcgatggtatccagcgtaaagttggaacagtgcggcttaaactgcacacaggtgctcggcgttgccagcaggcggcgaccattccagtcgagatccagctcctgatgaatatgaccgcacagcaagtatttgacgtgcggaaacttcgccagcacggtatccagttcgcccgcgttacgcagactgtgttgatcgagccaactacaacccgcaggtagcggatgatgatgcagcagcagcaacgtatggcgttctggcgcatcggccagtttacgttccagccactcaagctgaaactcgctcagctcaccgtgcggcacgccaaacacctggctatccagcaacaggatttgccattgctcaccaataaacacgcgcttcgccggggagatacccgcatcctgtaacgcgctgtacatcgcgggctggaaatcgtggttgcccggcagccagacgcagggcgcacgaaaacttgcgatgccttcagcgaaatgctgataggccgcagaggattgatcctgcgctaaatcacctgtcgcgacaatcaggtcgaattcgtgctggtgtggccgaatcgcctccagcaccgcctggtaactctcccaggtgtttacccctaacagggcttcgtgcttttgtgcaaacaggtgagtgtcggtaatttgtaaaatcctgactctggcctcaccagccagaggaagggttaacaggctttccaaatggtgtccttaggtttcacgacgttaataaaccggaatcgccatcgctccatgtgctaaacagtatcgcaaccagtccgctaaaaactgattaatttgatgcttttcgtcgcgttgatgcaactttttattaggataatcataccgcgctttgaagcgaaaaatctgctggctactacacacttcagccaccatcgcgtcatgatacagacgcaccgtcatactcggaaggctccagtaactgatcgcgggcgcagtctgttctattgtcaccagggtagtgtatcgggtgctttccacaatcgtcagccgatattgtgcgtttgccacctgatagcttacagtttcgccgggtgcgtcattgcgcggtaacaaacggcgcaattgactaaagttcatctcgcacaggcgcatcatttcaggaaagtcaggtgtgtaacgcttcatttatgcccactcattttttaacgcttgatgatgcagctgcagccattgcaaagcgatgacgctcgctgcgttgtcgattttcccctcttctacccactggtatgcctgttcccggcttaccacatgaacgcgaatatcttcgttttcatcagccagaccgtgaataccgcttgcggtcgtggcgtccacttcgcccaccataatactgctacgctcactggtgccccccgggcttgccaggaaacttaacaccggtttggtccgtttgactatcagtcccgcctcttcaatcgcttcgcgacgggcaacatcttccacactttcaccctcttcaatcatcccggcaaccatctccagtagccaaggggtttcgctggtgtcgtacgcggcaatccgaatctgctcaatcagcacaacttcatcacgcactgggtcaaagggtagcaagactgcggcgtgaccgcgctcaaaaatttcccgccgcacctcatgactcatttgcccgttgaatagacgatgacgaaatctataaagatctaaactaaaaaagccgcgataaagtgtttctcgtgcaataatttctacatcgtttttgccaaatgtaacgggcaggttgtctggcttaagcattgttaatgtcctggcactaatagtgaattaaatgtgaatttcagcgacgtttgactgccgtttgagcagtcatgtgttaaattgaggcacattaacgccctatggcacgtaacgccaaccttttgcggtagcggcttctgctagaatccgcaataattttacagtttgatcgcgctaaatactgcttcaccacaaggaatgcaaatgaagaaattgctccccattcttatcggcctgagcctttctgggttcagtagcttgagccaggccgagaacctgatgcaagtttatcagcaagcacgccttagtaacccggaattgcgtaagtctgccgccgatcgtgatgctgcctttgaaaaaattaatgaagcgcgcagtccattactgccacagctaggtttaggtgcagattacacctatagcaacggctaccgcgacgcgaacggcatcaactctaacgcgaccagtgcgtccttgcagttaactcaatccatttttgatatgagcaaatggcgtgcgttaacgctgcaggaaaaagcagcagggattcaggacgtcacgtatcagaccgatcagcaaaccttgatcctcaacaccgcgaccgcttatttcaacgtgttgaatgctattgacgttctttcctatacacaggcacaaaaagaagcgatctaccgtcaattagatcaaaccacccaacgttttaacgtgggcctggtagcgatcaccgacgtgcagaacgcccgcgcacagtacgataccgtgctggcgaacgaagtgaccgcacgtaataaccttgataacgcggtagagcagctgcgccagatcaccggtaactactatccggaactggctgcgctgaatgtcgaaaactttaaaaccgacaaaccacagccggttaacgcgctgctgaaagaagccgaaaaacgcaacctgagcctgttacaggcacgcttgagccaggacctggcgcgcgagcaaattcgccaggcgcaggatggtcacttaccgactctggatttaacggcttctaccgggatttctgacacctcttatagcggtagcaaaacccgtggtgccgctggtacccagtatgacgatagcaatatgggccagaacaaagttggcctgagcttcagcctgccgatttatcagggcggaatggttaacagccaggtgaaacaggcacagtacaactttgtcggtgccagcgagcaactggaaagtgcccatcgtagcgtcgtgcagaccgtgcgttcctccttcaacaacattaatgcatctatcagtagcattaacgcctacaaacaagccgtagtttccgctcaaagcagtttagacgcgatggaagcgggctacagcgtcggtacgcgtaccattgttgatgtgttggatgcgaccaccacgttgtacaacgccaagcaagagctggcgaatgcgcgttataactacctgattaatcagctgaatattaagagtgctctgggtacgttgaacgagcaggatctgctggcactgaacaatgcgctgagcaaaccggtttccactaatccggaaaacgttgcaccgcaaacgccggaacagaatgctattgctgatggttatgcgcctgatagcccggcaccagtcgttcagcaaacatccgcacgcactaccaccagtaacggtcataaccctttccgtaactgatgacgacgacggggcttcggccccgtctgaacgtaaggcaacgtaaagatacgggttatctgccgcattcttcccccttcagccttcaatttcgaccagccatcctctattctgatgggtatttaccactggtcccggaagacaaaaatgaaacggacaaaatccatacgccacgcatcgttccgcaaaaactggagcgcacgccatctgacaccagtcgctctcgcggttgccactgtttttatgctggctggctgtgaaaagagtgatgaaacagtgtctctctatcaaaatgctgacgactgtagtgctgcaaacccaggcaaaagcgccgaatgtaccaccgcgtacaacaatgcgctgaaagaagccgaacgtactgcgccgaaatacgccacccgtgaagactgtgttgctgaatttggtgaaggtcagtgccagcaggcaccagcccaggctggcatggcaccagaaaaccaggcgcaggcccagcaatccagcgggagtttctggatgccgctgatggccggttacatgatggggcgtctgatgggcggcggcgcgggatttgcacagcagccgctgttctccagcaaaaacccagccagtccggcttacggtaaatataccgacgcgacgggtaaaaactatggcgcagcccagccaggccgcaccatgaccgtaccgaagacggcaatggcaccaaaaccggcgaccaccactaccgttacccgtggcggttttggtgaatctgttgccaaacaaagcactatgcagcgtagtgcaaccggtacctcttctcgtagtatgggtggctgataccgatggaaagagtcagtattaccgagcgcccggactggcgtgagaaagcccacgaatacggtttcaattttcacaccatgtacggcgagccgtactggtgtgaagatgcttactacaagttgaccctcgcccaggttgaaaagctggaagaagtcaccgccgaactgcaccagatgtgcctgaaagtggtggaaaaagtgatcgccagcgatgagctgatgaccaaattccgcattccaaaacacacctggagttttgtgcgccagagttggctgacgcaccagccaagcctttatagccgtcttgatctggcgtgggatggcactggtgaacctaaacttctggaaaataacgccgatacgccaacgagtctatacgaggcggcgttctttcagtggatctggctggaagatcagcttaacgccggtaacttgccggagggcagcgaccagtttaacagtctgcaagaaaaactgatcgatcgcttcgttgagctgcgtgaacagtatggcttccagttgctgcatctcacctgctgtcgcgacacggtggaagatcgcggaaccattcagtatttgcaggactgcgcaacggaagctgaaattgctactgagttcctctacatcgatgatatcgggttaggtgaaaaaggtcagttcacggatttacaggatcaggtaatttccaacctgttcaaactgtatccgtgggaatttatgttgcgtgagatgttcagtaccaagctggaggatgcaggcgtacgctggctggaaccggcgtggaagagcattatctccaacaaggcacttctaccgctactgtgggagatgttcccgaatcacccgaacctgctgcccgcttattttgcggaagatgatcatccgcaaatggaaaaatatgtggttaaaccgatcttctcccgtgaaggcgcaaacgtgagcatcattgagaacggcaaaaccattgaagcagcggaaggtccgtatggcgaagaagggatgattgttcagcaattccacccgttaccgaaattcggcgacagctatatgctgattggtagctggctggtgaacgatcaacccgccggaattggcattcgtgaagaccgtgcattgatcacccaggatatgtctcggttttatccacatatttttgttgaataagccacgataccggatggcactcgccatccggtaattgttagcctatctgcacgctcagcatactcaggctgcccatttctataccctcaaccggaatggtaattggctcctgcccatcccacgcacctaacacatacaacaacggcaaataatgctctggcgttgggttgcttaacgtgccaccttcatggtcgaggtaattcaccagaggatgttgttccactggcccttgccacgtcagattcgctttcacatactcattaaagctcgtcgcccacggatacggactactatcaccgtgccacttcactgtgcgcaggttatgcaccacgttaccgctggcgaccaacattattccttcatctcgcagcgctgccagtttgcgccccatttcgaaatgccaggcggcaggtttgctactgtcgatactcaactgcaccatcgggatatcagcgtcaggatacatcttaatcagcacgccccagctgccgtggtcaaagccccaggcttctttatccagcgtcaccgggatcggcgctaacagctcaaccagacgctgtgccagcgcagggctacccggagcaggataatgcgtatcgtacagcgcctgcgggaagccaccaaagtcatgaatcgtgggcggcgtctccatcgcggtcactcctgttccacgggtaaaccagtgagcgctaaccaccacaatcgcttgcgggcgtggcaatgtcatccccaacttctgccagctgcgggtatacaaattatcttccagcacgttcatcggactaccgtgacctaaaaacaatgctggcatacgtgtactagacatgatgatatccttaactaaaggtgtcattttgatatcctcacaatacgcttgttcggcggagtaagaacccggataacaatgatgatgatcatcagttattttgacgatctgcctgaaggtgaagatttataaggagttgtcgatgagtgtacctctcattctgaccatactggcgggggcagccacgtttattggcgcgtttctcggcgttctcgggcaaaaacccagcaaccgcttactggcgtttagcctaggttttgcggcggggatcatgttgctcatcagtttaatggaaatgcttcctgccgcactagcagctgaaggaatgagccctgtgttgggttatggaatgtttatcttcggtctgcttggctattttggcctggaccgcatgttgccacatgctcatccgcaggatttaatgcaaaaaagcgtgcagccgttgccaaaaagcatcaagcgcacagccattctgctcactctcggcatcagtctgcataacttcccggaagggattgccacctttgtcacggcgagcagcaacctggagctgggatttggcatcgcactggccgtcgcgttgcacaatatccctgaaggtctggcagtggcaggcccggtttatgcggcaacggggtctaaacgcaccgcgattctgtgggcggggatttctggactagcagaaattcttggtggtgtgctggcgtggttaatcctcggtagcatgatttccccggtggtcatggcggcaatcatggcggcggttgcaggaattatggtggcgctcagcgttgatgaattaatgccgctcgccaaagagattgaccctaataataaccccagctatggcgtactatgtggaatgagtgtgatgggattcagtttagtgctgctacaaacggcgggaattggttaaaaacaacatcagaagttgtccagcgcatggacaacttctgccagcttcacgaaagccttattctaccttttcggctgtctcttctctcgtactgtttaagtatttgttccgcgcttcaagcagtgcgtctctgtcctggcgaaacgcccgacaataacgtttcaaatgcaggaaataacccaccacaaccagagcaatcaatacaatccagtaccaggcgataaacatccttttacccttaatatttaacaatactaaacatttagcgtataaatttcacatatcctttttcggatatattcatatggtcgcataataacggaacaattatatgattttgatcataatgaaaaagaatgcctgatattaatgaaattttctcatagaaagagaagcggaattaacatcttgcatagcagggaaaaataaaaaccgaagcctgctacaacttcggtttcttgattaaggcagtaaattaagcagcggttttcagctggctttacgctcatgtgcctgacggtatgccaccaggtcttcaatagtcacgagcgccatattgtgtttattggcaaactcaatacactctggtgcacgcgccatcgtgccatcgtcattagtcagctcacacagtacaccagccggtttaaagcctgccagcgtcatcagatcaatagttgcttcagtatgaccgccacgcgtcagtacaccacctgcctgagcgcgaagtgggaaaacgtggccaggacgattcagatcactcggttttgcgccatcggcaatcgctgcgcgaacggtcgtaatacggtcagcggcagaaacaccggtagtcacaccttcagctgcttcaatggtcacggtaaaaccggtgccataggcgctggtgttattttctaccatcattggcagatcgagttgtttacggcgatcttcagtaatgcacaggcaaacaataccgctaccgtggcgaatggtcagcgccatctgctcaacagtcatggtttctgccgggaagatcatatcaccttcgttttcacggtcttcatcatcaagcaccattacaccgcgtccttcacgcagcgcagccagtgcattttcaacacgttcgaaaggcgtaccaaaagaggaaagtagcgtctgattcatggtaaaaaaacctcactaaaattatggttaccagaatcagggcagtcttaggagtggcggcatatagccaaaataacgtgagcgggtccatgcccgacagaatcgttactctctcccatccggactctaaccgtcggccccggaattacaccggatctgctgtcctttgagttcgcacccaaagcgctcgcgggctttcaactgagttgatttaccgccggtggggaatttcgccccgccctgagaataagcggattcactataacgctaatgattagcggcagcaacgcatagcttcacataattctggtttatatctaatacaaacactaaaacgggccatcaggcccgttatatcagtgctctaactccagctctcttgcctgcatcatctgttgacaataccaggcataacgtgcgcaaaaccaggttctatgttcttcatccatgttaccagtaacggccagaatatcgaccgggcgaccttctgcgtgcattctggcaaaactacgcgccaggaaatcgaaattatttaaagaattaagactatgatccataagcacatcctccggttatcgcataccttttaaggccatatgctttttctgatttcagtattccccaatcagtgtagtgcctttaaacataacgtgcgtaaatatattgtccccgatcacactttttagtgaaaaataaaaaaccatattaaaagactttctcttccagaacttctctaacctgtgttattattaacacagataaatgtaagcaaggaaactattacaaagtaaatattgcgtcactaaatggacattggagtgatatatgattttattcgccgactataacaccccttatcttttcgctatttcctttgtactgttgatcggcctgttagaaatttttgcgcttatctgcggtcacatgctctccggtgctcttgatgcacatcttgaccattatgattctataaccacaggtcatattagccaggcacttcattatctcaatattggaagattgccagctctcgtcgttctctgcttactggctggtttttttggtcttattggcatcctgttgcagcatgcctgcatcatggtctggcaaagtccactgagcaacctgttcgtggttcctgtcagtttactgtttacgattattgcggtgcattataccggtaaaatagttgcgccctggattccacgcgaccatagtagtgctattacagaagaagaatatattggtagcatggcgttaattaccggtcatcaagccactagtggtaatccctgcgaaggaaaactcaccgatcaatttggccaaatacattatttactactggagcctgaagaaggaaaaattttcactaaaggagacaaagtgttaattatttgccgactttctgcaacgcgatatttggcggaaaataatccctggccccaaatattgtaatttattaatcaaaaggaaatttaataatggatgatattgttaattctgtgccctcctggatgtttaccgcaattattgccgtatgcattctgtttattattggaattattttcgccaggctctatcgtcgcgctagcgcagagcaagcttttgttcgtactggtttaggtgggcaaaaagtggtaatgagcggtggcgcaatcgtgatgccgatctttcatgaaataatccccatcaatatgaatactctgaagctggaagtcagccgcagtaccattgatagcctgattacgaaagatcgtatgcgcgtcgatgtagtagtcgctttctttgtgcgggtaaaacctagtgtagaagggattgccaccgctgcccagacgctggggcaacgcaccctgagccctgaagacttacgtatgttggttgaagataaatttgtcgatgccctccgtgcaacagctgcgcaaatgaccatgcatgagttacaggatacccgcgagaactttgtgcagggggtgcaaaatacagtggcagaagacctgagcaaaaacggtctggaactggagagcgttagtcttaccaactttaaccagaccagcaaagaacatttcaatccgaacaatgcctttgacgccgaaggtttaaccaaactgactcaggaaacagagcgccgtcgccgcgaacgtaacgaagttgaacaggatgtagaagttgcggtgcgtgaaaaaaatcgcgatgcgctaagccgcaagctggagattgaacagcaagaagcgtttatgacgcttgagcaggagcagcaggttaaaacccgtactgccgaacagaatgcacgtattgcggcttttgaagctgaacgtcgtcgtgaagcagagcagacacgaattctggctgaacgacagattcaggaaacagaaatcgaccgcgaacaggccgtccgcagtagaaaggttgaagctgaacgtgaagttcgcattaaagagatcgaacagcagcaggtcaccgaaatcgctaaccagacgaaaagcatcgctattgccgccaaaagcgaacaacagtcccaggcagaagcgcgtgctaatctcgcacttgcagaagcggtaagcgcccaacaaaacgtagaaaccactcgccagactgccgaagccgatcgtgctaaacaagttgccctaatcgctgccgcgcaggatgcagaaaccaaagcggttgaactgaccgtgcgggcgaaagcagaaaaagaagccgcagagatgcaggcggcggctatcgttgagttagccgaagctacacgtaaaaagggtctggcggaagcagaagcacaacgtgcgctgaacgatgctatcaacgtactttctgatgaacaaaccagccttaaattcaaactggccttgttgcaggcgctgcctgcggtaatagagaaatccgttgagccgatgaagagtatcgacggtatcaagattattcaggtcgatggtctgaatcgtggcggcgctgcgggtgatgcaaacacgggtaatgtggggggcggaaacctggcggaacaagcattaagtgccgctctctcttaccgcacacaggcaccgctgattgactccttgctcaatgaaattggcgttagtggcggcagtctggcggcattgactagtcccttaaccagtacaactcccgtcgaagaaaaagcagagtaaaccctcttccaggaataatccctggcccaaaaagccggggattttttatatctgcgttccgctaaaaagtgcaaatgatcaggttgttgcagcattttgcgtgacggctcggggaaggcaaaactgcatcagagaaagcattgcgtggggtctggcgctcatcaacaatcggggagtcagcagggggctgaaacgggaaagcccctcccgaagaagggggccttacagaaggaaagggttatgatgaagctcgtcatcatactgattgtgttgttactcgtaagtttcgcagcttattaacagccaatcagaggggggagaaatcctccctcacccttgttcctttactttaggttgaaaaaaaatcagcgtcaagaaggtttcattaacacatatccctggcccaaaaagccggggattttttatatctgcgttccgctaaaaggtgcaaatgctcaggacgttgcagcgttttgcgtgaccgctcggggaaggcaaaattgcctctgggaaagcattgcgcggggtccggcgctcatcaacaatcggggggcagcaaggggctgaaacgggaaagcccctcccgaagaaggggccttgtataaggaaagggttatgatgaagctcgtcatcatactggttgtgttgttactgttaagtttcccgacttactaacaactcatcagaggggggagaaatcctcccttacccttgttcctttactctaggttgaaaaaacaacagcgtcaataggcctgccatgtacgaagcgagatctgtgaaccgctttccggttagccttttttatcctgttggatcttcttgatgatgttggtcgtgctgcaaccgtcttcaaagttgagcaccaacacttcgccaccgttggcccagacttctttactcccggcaatctcttctggtttatagtcgccgcctttcaccagcagatctggcaagatcccggcgatcaagcgctgcggcgtgtcctcttcaaagctcactacccagtcgaccgcttccagtgcgcccagcacaatcatacgctgttcgagtgggtttaccgggcgggaatcccctttcagccgtttggtggaggcatcgctgttgacggcaacaatcaagcggtcacccagcttgcgggcatttgccagataagagacgtgcccggcgtgcaggatgtcaaagacaccgttggtcatcaccactttttcaccacgtttacgcgctgccgctacggccagcttcagttcctcttcggtcatcacgccaaagcctgtatctgcacgtccacgtacagcattttccagctcgatcgggctaaccgtggaggttcccagtttgccgaccaccacgccagccgccgcattggcaaagaagcaggcttcttccaggctattacccgctgccagcgttgccgccaggacgccaatcaccgtgtcgcccgcaccggtaacgtcatacacttcctgcgcttgggttggcatatgcagcggcgctttacccggttgcagcaggctcataccctgttcggaacgggtcactaacagagcgctgagttcgtaatcggcaatcagtttcatgccgcgctcaacaatctcttcttcggtcttacatttaccgacaacagcttcaaattcgctgagattcggcgttaacagcgtagcgccgcggtagcgctcaaaatcggtaccttttggatcaatcagcaccggaacacccgctttacgcgccagttggatcatctgctgtacgcttgccagcgcacctttggcgtagtcagaaagcaccagcgcgccaatgctactcagcgcctgattaatccgctcgtgcagcggctgcggatcaacaccttcgaaaccttcttcaaaatccagacggatcagctgttggttgcgggaaagtacccgtaatttggtaatggtcggatgcgtcggtacagaaacgaagtcgcatttgacgttgacgtcggccagagatttactcagcgcgcgcgctgcatcgtcaatgcccgtcaacccgaccaggcgtgcattagcaccgagagaagcgatattcatcgccacgttagccgcgccgcccggacgttcttcgatggtattcactttaaccacgggcaccggcgcttccgggctgatacgactggtggggccgtaccagtaacgatccagcatcacatcaccaaccaccatcactcctgcacgttcaaactctggcagcgttactttcattcctgtctcctgagagattcaaaatttgcgcgcgataataccatacttcattcttccaccagccacttctgccagcttgcccgcaccagttcacgctctgcggtgaagcaatcctcgctcacatggcccggcaattcctgtaatgccagatgatgaagttcatcgcgaagcgtagtgtaagcacgggtcagcgccatcgcttcctgctcttccataatgtcgttttgcgccagtagttccagaatacgcacgttgtcactccagcgcgttaacttcggtttttcatgagcgtagcgcaacaccagatattgggtaataaattcgatatcggtaattcccccttcatcagctttgatatcaaagcgatcgcgatgtttattgccgagatgagcgcgcattttctcgcgcatttcccgcacttccgtttgcagagttttaccttcacgcggcagcgtcataatctcgcgacgcactgcgtcaaagtgcgcggtgagctgcggatcgccgtacactacacgcgcacgcaccagcgcctgatgttcccacgtccaggcctcgtttttctgataatcggcaaatgcttctgcggatgtcaccagcattcccgccgccccggacggacgcagtcgagcatccacttcatacaaaatgccggaagaggtacgcgtactgaacagatgcataatgcgttgcgccagacgcagataaaactgccgcccgtcgatttcccgctcaccgtcagtcatcgcatccattgggcaatcatggaggaagataaggtcaagatcggaactgtagcctaactcccagccgcccagcttgccgtagccgaccaccgcaaaaccacgcccttcgcgttcgttcaggtgattcggcttaccgtagcgggcaaccatttgaacccacgcctgctgaacgacggcatctatcatggcttccgccagccaggttaagtgatcgctcactttcatcaccggtagcgtaccggcgatatccgctgcggcgatgcgtaacagctgcgcctgtttgaactgacgcagcgcctcaagctgttgctcttcgtcatcttccggcacgcgcagcaaatactggcgcaactcatcgcggtaggcatcggtcgccgtcggctggtaaagggtgtttggatcgagcaattcatccagcaataatggataacgcgccagctggctggcaatcatcgggctcgcggcacacagagaaatcaaatgtttaagcgccgcggggaattcactgagcaattctaaataggtggtgcgggtaacaatccccaccagcaaggcggtaatgcggctcagcgtaacggcagcgtcttcacgcgcacagacatcacttagcagatgcggcatcagatggtcgagcacctgacgtcctcgcggcccgatggtgcgcttatccagctctttgcggaaatcggcaatcagcgttagcacctgtttgcgatcatcctcgctaagatgcgccagcactggcgtagtgtcatcttcctgcaacgcatcctgccacagctcacgccactgttcgctcaggctctcttcctgagtttcactttcatcgtcgccaatcaattcattaaacacccggcgcacattggtcatatgtgcggtcagcgccccggtcagttgcggccagtcagcaaagtccatcgcccacgccagccgcgcacgattaagctcatcagaaggaagcgtctgggtttgttcgtcgttaatgctttgcagcaggttttccagacgccgcaggaacagatacgccactcgcaattgttcagcatcgttttcagaaagcagatgcagctcggcaatggcgctgagcgttggcagtaaagagcggctttgcaggctcggttcgcgtccgccgcgaatgagctggaacacctgaacgataaattcaatttcgcgaatgccgcctgcgccgagtttgatattgtcggtcaaaccacgtcgacgcacttcacgggcaatcatccctttcatgttgcgcaggctctgaatcacgctgaaatcgatgtaacgacggaaaacaaacgggcgcagcatcgcacgcaactcgttagcatagacgccttcgctatcgcccataatccgcgccttgaccatcgcgtaacgctcccagtcgcgcccctgctcctggtaataatcttccaacgcggcaaagctcagcaccagcgggccactttcgccaaacggacgcagccgcatatccacgcgatagacgaagccatcctgcgttggttgatccagcactttaatcagccgctgccccatgcgggtaaaaaactgcgcgttatccagttcccggcgtccaccctgcgtacaaccatgttccggccaggcaaaaatcagatcgatatcagaggagaaattcagctccccaccgcccagcttacccatgcctaaaatcagcagcggttgcgcttcgccctgcgcattgcacggcgttccccactcgcggcagcaggcgtcatacagccagtcacgcgccgcaacaatcagcgtctccgccagatagctgagctgctgcaatatgctctcttcagtaaccagtgccagcgtttgcgcccaggcgatgcgcaccataatgcgccgccggaatagccgcagctcgcgcattaacccggcttcgtcactcacattacagagcgcctcctgcaaccatgccgcgtaatgctgccattcgtcggcctgcggcggttggctttccagttccgtcagccactctggatgcgcaatcacgctgtcctgcacaaaatcactaaaagtaagtacactcttcgcctgtgcgctaagactttcctcggctaaaggctctggcagccgctcaacaacggtctgccagtactgctgtaacggactagagagcggcttcataagcgattttatccttgcctgattaacgttttccgctgtgcaaccagaacggttcctgattgtttgcctcattacggaaatgttcaatttcgatgcgttgcccggtcgcaatagcgtgatgcagcccctgccagttctccagccaggcttgcgcgacgacaggatcatagtaacccgccagcaacagtatactgtcaatatcacgcgtcaggcgtggcaactggtcacggtagcgatcgcctaacggctggcagaaaacgcttttcagttcagcggcatggcgggaaagatggatatcggcaaagcgtttgaaggagtcgctgattttgccctgcgctttggcatctaaaaatggctgccatgctttgcttaccaaccattcggtcaacgccagcttcgccattgccgtttcggtagagtagaccgccgtcacggcagacaccgcagaagcaatggtcgcctcgcattgagtcagcagatcacgtaagtgagtgctcgctttacgcggcacaataccaccgaacagcatcagcgtatgacggaccaggctaatggctgccagcacctgttctttcgccgcatcgttgccgcgtacccacagttcttcatgatactgccattgcgctaacgccagctcgagcgccgcttccagcccctgttccacatcggcttttgccgcaacatgcaaaatggtggtcggtttgatttcacgcgccggattgccctgcgccagatgatagccacgcgccgctttgctcaggctgccctggcgtaatccggtttggcttaccagttggttcgccagtttcagcaccgcgcgcgtgtcgccgctaagcagttccagttccagctcacagataggttcagcaaattcacccgctttcacttccccctggtcgagggcgatttcaatttggctaccatcgaccgccaccagccatttttcgcgataaaaatcggtgctgaacagcggctgcacgcgggaggcgagatcggcgggcaattcgccgttcggccagacttccgtcggtaactgcgccaggtcgagcgtcggttcgctcaacgccacgttatattccgggcgctgatgtaagccgcctgtcactcttcctgcaactttcatggtcatctcatagcgaccgttttcgccacgaatacgtaagcccatatcgtgcccacgcagccagttatccggcgtttcgtagtaaatattcagcaactgcacggggtcatggtgctcgccgcccagcgtattgagatggtcacgcaacgcctcaacggcactgtgattaacaataaactttaattcgatttcctgagccatggcctttacttatcggttatgtcacataagtgacgatgaacggcgaacttaatgcgatcttttttgtcagtagatagtattttgcgccaaattgccatgcaacgggcaatttgacgggcgtaaaagtttgaagcagtggcaagacctgacacagaggattccgattgatgtcgaatgctttgcgtagcgacactgatgccactactatcgttccactttccatgacaataacgacagcctgatgccaaaattacgcctgatcggattaactttactcgcacttagcgcgactgccgtcagtcacgctgaagaaacgcgctatgtttccgacgaactgaatacctgggtccgcagcggtccgggagatcattatcgcctcgtgggcacggttaacgccggcgaggaagtgaccttattacaaactgacgccaacaccaattatgcccaggtgaaagacagctctggccgtaccgcctggatcccgttgaaacaacttagcactgagccaagcctgcgctcccgtgtgccagatctggaaaatcaggtcaaaaccctgaccgataaactcaccaatatcgataacacctggaatcagcgcaccgcagaaatgcagcaaaaagtggcgcagagcgacagcgtgatcaacgggttaaaagaagaaaatcagaaactgaaaaacgagctgattgtcgcgcagaaaaaggtcgatgccgccagcgtacagctggatgacaaacagcgcaccatcatcatgcaatggtttatgtatggcggtggcgtgctggggcttggcttgctgctcggtctggtactgccgcacctgatcccaagccgcaaacgcaaagatcgctggatgaactaaatcgccttcttcgttgcactgtcttattattaggaattgtgtatttgacgaagggatgatggcgtgaagatttatctggtcggtggtgctgttcgggatgcattgttagggctaccggtcaaagacagagattgggtggtggtcggcagtacgccacaggagatgctcgacgcgggctaccagcaggtaggccgcgattttcctgtgtttctgcatccgcaaacgcatgaagagtatgcgctggcacgtaccgaacggaaatccggttccggttacaccggttttacttgctatgccgcaccggatgtcacgctggaagatgatcttaagcgtcgcgatctgaccattaatgcgctggcccaggacgataacggcgagattatcgacccgtacaacggtctgggcgatctgcaaaatcgtctgttgcgccatgtttcccccgcttttggcgaagatccgttacgcgtattgcgcgtggcgcgttttgctgcgcgttatgcccacctcggttttcgtattgccgatgaaactctggcgttgatgcgcgagatgacccatgcgggtgaactggaacacctgacgcctgaacgggtatggaaagagacggaaagcgccctcaccacccgcaatccacaggtgttcttccaggtactgcgcgattgcggcgcactgcgcgttttattcccggaaattgacgcactgtttggcgttccggcccctgccaagtggcatccggaaatcgatacgggtattcataccttaatgacgctcagtatggcggcgatgctgagtccgcaggtcgatgtccgtttcgcaactttatgccacgatctcggtaaagggctgacgccgccagaactctggccgcgtcatcatggtcatggcccggcgggtgttaagttagtggaacaactatgccagcgtctgcgcgtgccaaatgaaattcgcgatttagccagactggtggctgagtttcacgatctcatccacaccttcccaatgctgaacccaaaaaccatcgtcaaattatttgattccatcgatgcctggcgtaaaccgcagcgtgtcgagcaactggcgctgaccagcgaggctgacgtgcgcggcagaaccggttttgaaagtgcggactacccgcaaggccgctggttgcgcgaagcctgggaagtggcgcagagtgtgccgacaaaagccgtcgttgaagcgggatttaaaggtgtggagattcgcgaggagctgacccgacggcggattgcggcggtagccagctggaaggaacaacgttgcccaaagcctgaatgagtattgggcattttgccggatgcggcgtaaacgccttatccggctacatgtcaacgacagttgtaggcctgataagacgcgcaagcgtcgcatcaggcgttgattgccggatgcggcgtgaacgccttattcggcctacgcaatcgttgacaacgccaagcatccgacactattcctcaattaaaagaacacgacatacaccgcagccgccacaataaagcgataaatggcgaacgggataaagctaatgcgcttaatcaattgcaggaaggttttaatcgctatcagcgccaccacaaaagcggtgataaacccaacggcaaacatcgggatatcgccgcttgtcaggaagccccagcttttgtagagatcgagcgccgttgcgcccatcatcatcggcaccgccagcaggaagctaaactcggaagcagcgtaacggctcacccccatcagcatcccaccactaatggtcgccccggaacgggagaaacccggccacagcgccagacactggaaacagccaatcataaatgcctgacgataggtcatatcatcaagacccggcgcacgcggctctttcggcttcaggcattcggcggcaatcagcaacaaaccgccaacgaccagcgcatacatcacatttatcgggttaaacaaactcttaatcgtgtcgtggaacaacagccccaataccaccgccggaatcatccccagcaaaatgtggatcagcgttaaacgacctttgctttcaccttcgtgctgcaacgggcggccaaagtggatgccaatcaggccaaacagacgccgccagaacatcactactaccgccagaatacttcctaactggatcacaacttcaaaggttttcgccgtgtcgccctcaaaccccaacaagtgaccgacaataatcatatggcccgtgctggataccggcagaaattctgtcaatccttcgaccacacccaatattgccgctatcagcaggctgtgcatatcgctcatcaataaacccctaaattattaaaatgtaccgcttgtccgaactactgcgtatgaccaggttataaccgtttggtttaacagctgtaaaattaattattttctttcagattattgccacgctcaatgattacgccaacattcgccgcccgcgccactgcgcctggcttgctgagtttgatacgcacccacgggctgttgaagcgtgctaacagcagctccgccacctcttcagccacgcgttccaccagcgcaaaacgcgccccctcgacgtggctgaccaccgtttctgcaatgtcagcgtaactgaggcaatccgccacatcatcacttttcgccgctttacggttatcccacgccatttcgatatcgaacactaacttctgttcgatggtctgttcccagtcgtaaacaccaatagtggtgattacgctaagttgctctataaatacaatatccatcacgtcctgcctgctttttggctaaccggataccacttccggcgaaatgtgcgtattatccacagattcatcgttgaacacgaattttcaaaacggaacagcttatgagtgcaatcgcgcctggaatgatcctcatcgcgtacctctgcggctccatttccagtgccattctggtttgccgcttgtgtgggctgcccgatccgcgaaccagcggctccggcaatccaggcgcaaccaatgtgttacgtatcggtggcaagggagcagccgtagcagtactgattttcgacgttctgaaaggaatgttgcccgtctggggcgcgtatgaattaggtgtcagccccttctggctaggcttaattgccatcgccgcctgtcttggacacatctggcccgttttcttcggatttaaaggaggaaaaggcgttgctaccgcttttggtgccatcgcacccattggctgggatctcaccggagtaatggcgggaacctggttactgaccgtgctattgagcggatacagcagcctgggagcgattgtcagtgcactgattgctccgttttatgtctggtggtttaagccacaattcaccttcccggttagcatgctctcttgcctgatcctgctgcgtcatcatgacaacatccaacgtctgtggcgtcgtcaggagacaaaaatctggacgaaattcaaaagaaagcgcgaaaaggatcccgagtgatttctggtggatttacatgacctgatagccttcatcgggcttgcccagccgttgctggcaccatgccgccagaaattccacgcagacacgtaatttcatgctgcgatagagcggctcccggtaaacagcccagatattggcgctttgtgcatactctggcaatacttgcaccagtttgccactctccagaaacggcaacacatcccactcggaacgcagcataatccctttgccctccagcgcccattgcagcacaatctcgccgctattggaggaaagatgcccgcttaccttcacgctttttttctcctgaccgttccccaactcccatattccatgggtcatatcgcgctctttggtcaccagacagtcatgacgacttaattcctgtagggattgtggctgcggatatttttgcagatactcaggtgctgcgcataatattcttttattttttgtcaaaagatgcgcaatataataatcaggaatttcgtcattaatacgaatatccagatcaatattatcctgcactaaatcaatttgccgatcgaacaattcaaaatgcacctgtaactcaggataattgcgcatcagttcggtaatagctggcgcaatatggctgcgcccaaaaccaaaactgcaaccaatacgaatcatcccctccgggcgcgttttgatttgcgtgacgtcatcgaccagtcgctgatattgggtgaggatttccaacgcatgttcgtaacaacgttggccactttcagtcagcgccacgccgcgagcggagcggttcagcagcgttgttgccagcgtattttcaaggatttggatccgcttggtgacaaatgcaggcgtctgcccaagcgtcgccgctgcggcgctaaaactcccgctgtgaacgatttctaccagtacctgcaagtctttggctaaaggccagctattcagcatcgttaattatccgcagttgtgataagcgcagtgtatttcgcaaaacattgccattccctgctctggcgcaatattcattcttattttcgcgttgattcacgaactgttaattacatattcacggtggcaaaaaatataaaaccacatttttagtggtagtttgtggcggtgaatttttccagacaaatacaaaaactggagttgccatgatgagcgaaagtaataagcaacaggcagtgaataagttgacagagattgtcgctaactttaccgccatgatttctacccgaatgcctgatgacgtggtggataaactaaaacagctaaaggatgccgaaacgagcagcatggggaaaattatctaccatacgatgttcgacaacatgcaaaaagcgattgacctgaatcgtcctgcctgtcaggacaccggggagattatgttcttcgttaaagtcggttcccgcttcccactgcttggcgagctgcaaagcatactcaaacaagccgtggaagaggcaaccgtcaaagcgccactacgtcacaatgcggtagaaatttttgacgaagtaaacaccggcaaaaataccggtagcggcgtaccgtgggtcacctgggacatcatccccgacaatgacgatgcggaaatcgaagtttacatggcaggcggcggctgcacgctacctggccgcagcaaagtgttaatgccgagtgaaggctacgaaggcgtggtgaaattcgtcttcgaaaatatctccaccctcgccgtaaacgcctgtccaccggtactggtgggcgtgggcatcgccaccagcgtggaaaccgccgccgtactcagccgtaaagccattttgcgcccgattggcagccgccatcccaatccaaaagcggcagaactggagctacgcctggaagaaggactcaaccgtctggggattggtccacaagggctgaccggcaacagtagtgtgatgggcgtacatatcgaatctgccgcccgccatccgagtaccatcggcgttgctgtctctaccggctgctgggcgcatcgtcgcggcacgctgctggttcatgccgatctcacctttgaaaatctgtctcacacccggagcgcgttatgaaaaagatcctgacaaccccgatcaaagctgaagatctgcaagatattcgcgtcggcgatgtgatctacctgaccggtacgctggtgacctgccgcgacgtttgtcaccgccgtttgatcgaactgaaacgtccgatcccttacgatctcaacggcaaagcgattttccacgctggccccatcgtgcgcaaaaacggcgacaaatgggagatggtctccgtcggcccgacaaccagtatgcgtatggaaagttttgaacgtgaatttattgagcagaccggcgtgaaactggtggttggcaaaggtggtatggggccgctgaccgaagaaggctgccagaaattcaaggcgctacatgtgattttcccggcaggctgcgcggtgctggcggcaacccaggtggaagagattgaagaagtgcactggacagagctcggaatgccggagagtctgtgggtctgccgggtcaaagagttcggcccgctgattgtctctattgatacccacggcaacaacctgatagccgaaaacaaaaagctgttcgccgaacgccgcgatcccatcgtggaagagatctgcgagcacgtccattacatcaaataaccctcccggagaggctcacccctctcctttttcgcaggcataacacgatgaaaccttccactgaatggtggcgatatcttgcgccgctggcggtcatcgccattattgctctacttccggttcccgcagggctggagaaccatacctggctctactttgccgtttttactggcgtgatcgttggactgatcctcgaacccgtgccgggtgccgtggtggcgatggtgggtatatccatcatcgccatactctctccctggctgctgttcagcccggagcagctcgctcagccaggctttaaattcactgcaaaatccctcagctgggccgtttccggtttttctaatagcgttatctggctgattttcgccgcctttatgtttggcacaggctatgaaaaaaccgggcttggacgccgcattgcgctgattctggtgaaaaagatgggacatcgcacgctgtttctcggctatgcggtgatgttctccgagctgatcctcgcacctgtaacaccgtccaacagcgcgcgtggtgcggggattatctatcccatcatccgtaacctgccaccgctctatcaaagtcaaccaaacgacagcagtagccgcagcattggcagctacatcatgtggatggggattgttgccgactgcgtgaccagcgccattttcttgacggcgatggcaccaaacttgctgttaattggactgatgaaaagcgcatctcacgccacgctgagttggggcgactggttcctcgggatgttgccgctcagcattttactggttctgctggttccctggctggcttacgtgctgtacccgccggtactgaagtctggcgatcaggtgccgcgctgggcagagacggaactgcaggcaatgggcccgctctgtagccgtgaaaaacggatgctggggctgatggtaggcgcgctggtgctgtggattttcggcggtgattatatcgatgccgcgatggtcggttacagcgtggtggcactgatgctgcttctgcgcattatcagttgggacgacattgtcagtaataaagcggcgtggaacgttttcttctggctggccagccttatcaccctcgccaccggactcaacaacaccggttttattagctggtttggcaaactgttagcaggcagcttaagcggttatagcccaacgatggtgatggtggcgttgattgtggtgttttatctactgcgctactttttcgccagcgccacggcgtatacctccgctctcgcaccgatgatgattgctgctgcgctggcgatgccggaaatcccgctgccggtgttctgcctgatggttggtgcggcaattggtctggggagcattcttacaccatacgccaccggccccagtccgatttactacggcagtggttatctgccaacggcggattactggcgactgggggcgatttttgggctgatattcctcgtattgctggtgattaccggcttactgtggatgcccgtggtgttgctttaagtgaggacggtgccggaaattgctctccggcacccaatagttttacgcagccggtaactccgccagcggccagcgcggacgcacgctaacgccgagatccgccgtcgcgcctgctttaaaccgcaccattccggcataggcgatcatcgcgccgttatcagtacaaaattccggacgcgcgtagaacacttcgccgcggcgttttttcatcatttcagccagcttcgcccgtaacgtacggttagcactcacgccgcccgccatgaccagtcgcttaaagcccgtctgacccagcgcccgcttgcacttaatcatcagcgtatcgaccaccgcatcttcaaaggcgcgggcgatatcagcacgcgtctggtcgtcggtgccgttgtcacgaatggtatttgccgcgaaggttttcaggccggagaagctgaaatccagccccggacggtcggtcatcggacgcgggaagacaaagcgcccggcagtaccctgagccgccattttgctcagtaacggcccgccaggataatccagccccagcagcttcgcggttttatcaaacgcttccccggcggcatcatcgatagactcgccgagcagctcgtactgaccaatgccagtcacgctgattaactgcgtatgaccgccggaaacaagcagcgcaacaaacggaaattccggcgggttatcttccagcatcggcgctaacagatgcccttccatatggtgtacagggatcgccggaacgtcccaggcaaacgccagagaacgccccacggtcgcgccaaccagtagcgcgccgactaatccagggcctgcggtataggccacagcatcaatgtcttttgccgttaaaccagactcctttagcgccgcctggatcaacggtacggttttacgcacatgatcgcgggaggccagttcaggcacgacgccgccgtagtcagcgtgcaatttcacctgactatacaattggttggctaacaaacctttttcatcgtcgtaaatggcgatgccggtttcatcgcaggaagtttcaatacccagtacacgcatgacttgttttacctcgctttattaccgcgcagtgtaggaccaatgcgggttgatgtaaaactttgttcgcccctggagaaagcctcgtgtatactcctcacccttataaaagtccctttcaaaaaaggccgcggtgctttacaaagcagcagcaattgcagtaaaattccgcaccattttgaaataagctggcgttgatgccagcggcaaaccgaattaatcaaaggtgagaggcacatgccggtaattaaagtacgtgaaaacgagccgttcgacgtagctctgcgtcgcttcaagcgttcctgcgaaaaagcaggtgttctggcggaagttcgtcgtcgtgagttctatgaaaaaccgactaccgaacgtaagcgcgctaaagcttctgcagtgaaacgtcacgcgaagaaactggctcgcgaaaacgcacgccgcactcgtctgtactaattccccgagagcgttgctctccgatcagaccgagttgtagttgtaaggccgtgcttccgaaaggaatgcgcggcttattttcgtttatgaattgctaaaaatcggggcctatggctggacgaatcccacgcgtattcattaatgatctgctggcacgcactgacatcgtcgatctgatcgatgcccgtgtgaagctgaaaaagcagggcaagaatttccacgcgtgttgtccattccacaacgagaaaaccccgtccttcaccgttaacggtgagaaacagttttaccactgctttggatgtggcgcgcacggcaacgcgatcgacttcctgatgaactacgacaagctcgagttcgtcgaaacggtcgaagagctggcagcaatgcacaatcttgaagtgccatttgaagcaggcagcggccccagccagatcgagcgccatcagaggcaaacgctttatcagttgatggacggtctgaatacgttttaccaacaatctttacaacaacctgttgccacgtctgcgcgccagtatctggaaaaacgcggattaagccacgaggttatcgctcgctttgcgattggttttgcgccccccggctgggacaacgtcctgaagcggtttggcggcaatccagaaaatcgccagagtttgattgatgcggggatgttggtcactaacgatcagggacgcagttacgatcgtttccgcgagcgggtgatgttccccattcgcgataaacgcggtcgggtgattggttttggcgggcgcgtgctgggcaacgatacccccaaatacctgaacagcccggaaacagacattttccataaaggccgccagctttacggtctttatgaagcgcagcaggataacgctgaacccaatcgtctgcttgtggtcgaaggctatatggacgtggtggcgctggcgcaatacggcattaattacgccgttgcgagcttaggtacgagtaccaccgccgatcacatacaactgttgttccgcgcgaccaacaatgtcatttgctgttatgacggcgaccgtgcaggccgcgatgccgcctggcgagcgctggaaacggcgctgccttacatgacagacggccgtcagctacgctttatgtttttgcctgatggcgaagaccctgacacgctagtacgaaaagaaggtaaagaagcgtttgaagcgcggatggagcaggcgatgccactctccgcatttctgtttaacagtctgatgccgcaagttgatctgagtacccctgacgggcgcgcacgtttgagtacgctggcactaccattgataagccaagtgccgggcgaaacgctgcgaatatatcttcgtcaggaattaggcaacaaattaggcatacttgatgacagccagcttgaacgattaatgccaaaagcggcagagagcggcgtttctcgccctgttccgcagctaaaacgcacgaccatgcgtatacttatagggttgctggtgcaaaatccagaattagcgacgttggtcccgccgcttgagaatctggatgaaaataagctccctggacttggcttattcagagaactggtcaacacttgtctctcccagccaggtctgaccaccgggcaacttttagagcactatcgtggtacaaataatgctgccacccttgaaaaactgagcatgtgggacgatatagcagataagaatattgctgagcaaaccttcaccgacagtctcaaccatatgtttgatagcctgcttgaactgcgccaggaagagttaatcgctcgtgagcgcacgcatggtttaagcaacgaagaacgcctggagctctggacattaaaccaggagctggcgaaaaagtgatttaacggcttaagtgccgaagagcgatcgggaagcccccgacagccgcactgagaggcagcggcaaatatataagtacgccctcgtaattatcgttggcggtaaacaaccgttggatttcagcgttaacggctgaaggacatcgggtcaatcgcccaacaccaacctcatgaaataagtgtggataccgtcttatggagcaaaacccgcagagtcagctgaaacttcttgtcacccgtggtaaggagcaaggctatctgacctatgccgaggtcaatgaccatctgccggaagatatcgtcgatagtgatcagatcgaagacatcatccaaatgatcaacgacatgggcattcaggtgatggaagaagcaccggatgccgatgatctgatgctggctgaaaacaccgcggacgaagatgctgccgaagccgccgcgcaggtgctttccagcgtggaatctgaaatcgggcgcacgactgacccggtacgcatgtacatgcgtgaaatgggcaccgttgaactgttgacccgcgaaggcgaaattgacatcgctaagcgtattgaagacgggatcaaccaggttcaatgctccgttgctgaatatccggaagcgatcacctatctgctggaacagtacgatcgtgttgaagcagaagaagcgcgtctgtccgatctgatcaccggctttgttgacccgaacgcagaagaagatctggcacctaccgccactcacgtcggttctgagctttcccaggaagatctggacgatgacgaagatgaagacgaagaagatggcgatgacgacagcgccgatgatgacaacagcatcgacccggaactggctcgcgaaaaatttgcggaactacgcgctcagtacgttgtaacgcgtgacaccatcaaagcgaaaggtcgcagtcacgctaccgctcaggaagagatcctgaaactgtctgaagtattcaaacagttccgcctggtgccgaagcagtttgactacctggtcaacagcatgcgcgtcatgatggaccgcgttcgtacgcaagaacgtctgatcatgaagctctgcgttgagcagtgcaaaatgccgaagaaaaacttcattaccctgtttaccggcaacgaaaccagcgatacctggttcaacgcggcaattgcgatgaacaagccgtggagcgaaaaactgcacgatgtctctgaagaagtgcatcgcgccctgcaaaaactgcagcagattgaagaagaaaccggcctgaccatcgagcaggttaaagatatcaaccgtcgtatgtccatcggtgaagcgaaagcccgccgtgcgaagaaagagatggttgaagcgaacttacgtctggttatttctatcgctaagaaatacaccaaccgtggcttgcagttccttgacctgattcaggaaggcaacatcggtctgatgaaagcggttgataaattcgaataccgccgtggttacaagttctccacctacgcaacctggtggatccgtcaggcgatcacccgctctatcgcggatcaggcgcgcaccatccgtattccggtgcatatgattgagaccatcaacaagctcaaccgtatttctcgccagatgctgcaagagatgggccgtgaaccgacgccggaagaactggctgaacgtatgctgatgccggaagacaagatccgcaaagtgctgaagatcgccaaagagccaatctccatggaaacgccgatcggtgatgatgaagatagccatctgggggatttcatcgaggataccaccctcgagctgccgctggattctgcgaccaccgaaagcctgcgtgcggcaacgcacgacgtgctggctggcctgaccgcgcgtgaagcaaaagttctgcgtatgcgtttcggtatcgatatgaacaccgactacacgctggaagaagtgggtaaacagttcgacgttacccgcgaacgtatccgtcagatcgaagcgaaggcgctgcgcaaactgcgtcacccgagccgttctgaagtgctgcgtagcttcctggacgattaatcggtaggccggatcaggcgttacgccgcacccggcactaggccctctgcacaaacgccaccttttcggtggcgttttttatcgcccacgcactaccagcgcctggtccagctcgcgatacgcttcaaccagtttctccagactaacgcgacttaaaccgctgggatttggcagcacccaaatctgcgtgctaccaatggtgagcgtttgtttcccccactgtgcaccgcgctggctgaatccctgttcatatgcttgtttgcccagaatcgccaacgcctgcggctgataatcttcaattttttcaatcagcttacgcccgcctgcgtgtagctcctgcttactaacttcattggcttgcaccgttggacggtctaccagtttggtgacgccacaacgataatccagcagatgctgtgcctcctgcggcttcaactgacggtcggtaaacccggcctgatatatcaccttccagaagcgatttgccggatgagcaaagggaaaaccagtcccggcggaactaagcccagggttgataccgcaaaacacgacccgtaaccctggagccaaaatatcctcaaccatatttactcctttctaacatcaccaggaaaagtataacggattgaaaatacattgtttataaaaacagcaggcgcgcggtaatggctggattgcgacacggagttactttataatccgctaccatggccccttagctcagtggttagagcaggcgactcataatcgcttggtcgctggttcaagtccagcaggggccaccagatatagcaaaggctgacgagaaatcgtcagcctttttctttttatatatcagttactttgcgtgccagtaagccgctgcacgtacccgctgtgggtcatactgttccgcttcaaagcggcggcttaaattcttaacgactttaccttcgccggttatccagatgaagtaatcatcggcagggatttgcatctgcgccagacgcgcatctaccgcctgctcatcatgtgccagccattcgatattaaaaccatcaaggtgcgcgagataatcctgacaggcgttatcccgcacgctaaccagcgcactaacttgcggtttaacggcaagtttgctcaacgtttccaggcggcggcgcaatgcaggcattccggattcatcgcagacatacagctgatacgcgtaatcttccggcaccaccaggctaccgcgcggacctgccaccgtaagtttatcgcccggttgcgcctgcatcgcccagccgctggcgaccccaccgtcgtgaataaagaaatcaatcgccagttcatggcgtagttcgtcatacagcggcgtatagtcacggctcggtgggcgtggtccttccggccagacgatgccctcttccgttaccgttggcggcacaaagtgagcgtcaggttgaggaaagaagagtttgctgtgatcgtcaaagccacggcttgtaaaaccgtccagcgcctcgccgccgaggacaatgcgctgaaaaccggcgctgatgcgctcaacgcgtaacacagtcagttcacggaagcgcagatcattgcgaacgcgctgcgggtagcggggggtgttattcattgttatcgccttcgtgatggtaatcagatatatctaaataaaactcgcaaatgataatgattgttaatcatgataaatgcaagcgatttgtagaactgatatgtctatagtctgataagacgaaccgcctcttctcaggcatcattactcaacgccggatgcggcgtgaacgccttatccggcctacgtgtgagatgagtccacgtttaaaaatcatttttacacttgcaagaacgctcatatcagatataaattagatatatctaattaagcaaaaggaggctgatatgagccatcatcacgaagggtgttgtaaacatgaaggccagccacgccatgagggctgctgcaaaggtgagaagagtgaacacgagcactgcggacacggtcaccagcatgaacacggtcaatgctgcggtggtcgccacggtcgcggcggcggtcgtcggcaacgtttctttggtcacggtgaattacgtctggtgattctggatattctcagccgcgatgacagccacggttacgaattgattaaagcgattgagaatctaacccaggggaattacaccccaagcccgggcgtcatctacccaacgctggattttctgcaggagcagagcctgattaccatccgcgaagaggaaggaggtaagaagcagattgcgctgaccgaacaaggcgcgcagtggctggaagaaaaccgcgaacaggtggagatgattgaagaacgcatcaaagcgcgttgcgttggcgcggcgctgcgccagaacccgcaaatgaagcgggcgctggataattttaaagcggtgctggatttacgcgtcaaccagagcgatatcagtgatgcacaaataaaaaagatcattgcggtgatcgaccgcgccgcttttgatattacgcaactggattaatcgccgcatccgccagtggcgcggtgcaattgccggatgcgacgcttgacgcgccttatccggcctacacccgctacacaccccgcaggcctgataagatgcgccagcatcgcatcaggcattgtgctccaaccgccggatccggcataccgattaatgcagtaccgtcaccgcgtcttccagtcggctggcgcggtgtttcaccatcgcgctcacctgcgcactctcttccaccagctcggcatttttctgggtgatcaggttaagctcatccactgcacgggtcaggctggaaagcccatcggcctgttccagcgtactatggctaatctgggcgatcaactgggtgacgtttttcacctgtgccacaatatcttccatcgtccgtccggcggcgtgtacctgctggctaccggattgcaccttatcagcactggcatcaatcagcttgcgaatatcgttggcagcattagcgctgcggctggctaaatgacgcacttcccctgccaccactgcaaaacctttgccctgttcgccggcacgcgccgcttccaccgccgcattcagggccagaatattggtctgaaacgcaatatcgttaatcaggctagtaatggtgccaatgcgctgggtactgtcggcgatatcgtccattgtcttgatcaccgtggtcatcgcctccccaccctgcactgccgcattactggcagtgatactcagtttatcggcagcgctcgccgtggcagagttctgtttcacgctcgccgccatttggttcatggtcgccaccgtttgctgaacgttatcaactgtctgctgggtatgttcgttcagttcatcggtgcctttcgccagcgtctcactgccatttctgacactggacacctggctactgacatcgttaattagccaacggcacatcaggccaagttgccctaccgcacgtaatgtcagccccagctcatcgctgcgattcagatgctcaacactattacgttctccggtcgccaccttcagtgcctgatgggcaacattttctatcgggcgcacaatctgccattcaaaacaggcgcttgccaacaataccactaacgcacagaggatatacgtcaccaccggggcagcaacaaaccaaagcatggccgccagcaagataaacatcagggtcatcactccacgcgcccgccagcgaagcggtaaactaggcagtttacccagccagcctttacgcaccaccaggcctttatgaatacgcttactggtacgtccggcgttcaacgctttgtacagcggctccaccgccgcgatctcttcatccgtcgcccgggtacgaatgctcatatagccactgatttttccctcgcgcaccatcggtaccgcattggcccgcacccaataatggtcaccatttttgcggcgatttttcacgatgccgctccagggctccccttttttcagggtgaaccacatatccgcaaacgccgcttttggcatatccgggtgacgcaccatgttgtgcggctgcccttgtaactcttgcaaggtatagccgctcacctgcacaaaagtgtcattagcatgagtgatatagctttgcagatcggtagtggacatcagagtggtatcgtccgccagcggggtattttgctgggtgacatacggatgagaagacatgttcgcgtcctgtgcaggttatatggttgttaacttcttgtcagagtttatgtcggccccgctgcggttatctttaaccgattaatttgatttagatcgcaatttgcgatttaaacacaaatctaattccttgatttaaaatactttcactctgttactatacgaaaacgttaattatcttgcccaaaaatcaggcaattattgccctgaaaacgtgcatttgcgcagcaatcatcaaatccatacccgacaaaaaccgtgcaaaataacaacaaatgttaacagatagcattaaatattgcacaaatgataaccgaatttgtgtttatcccgattttcgcgatcgcagccggagtggcgcaatccctgcaatacttaaatcggtatcatgtgatacgcgagcctccggagcatattttgaacaggttacctagcagcgcaagcgctttagcgtgcagcgcccacgccctgaatctcattgagaagcgaacgctggatcatgaggagatgaaagcacttaaccgagaggtgattgaatacttcaaagagcatgtcaatccggggtttttagagtatcgcaaatctgttaccgccggcggggattacggagccgtagagtggcaagcgggaagtttaaatacgcttgtcgacacccagggccaggagtttatcgactgcctgggaggttttggaattttcaacgtggggcaccgtaatccagttgtggtttccgccgtacagaatcaacttgcgaaacaaccgctgcacagccaggagctgctcgatccgttacgggcgatgttggcgaaaacccttgctgcgctaacgcccggtaaactgaaatacagcttcttctgtaatagcggcaccgagtccgttgaagcagcgctgaagctggcgaaagcttaccagagtccgcgcggcaagtttacttttattgccaccagcggcgcgttccacggtaaaagtcttggcgcgctgagcgccacggcgaaaagcaccttccgcaaaccgtttatgccgttactgccgggcttccgtcatgtgccgtttggcaatatcgaagccatgcgcacggctcttaacgagtgcaaaaaaaccggtgatgatgtggctgcggtgatcctcgaaccgattcagggtgaaggtggcgtaattctgccgccgccgggctatctcaccgccgtacgtaagctatgcgatgagttcggcgcactgatgatcctcgatgaagtacaaacgggcatggggcgcacgggcaagatgttcgcctgcgagcatgagaacgtacagccggatatcctctgccttgccaaagcgctcggcggcggcgtgatgccgattggcgcgaccatcgccactgaagaggtgtttagtgttctgttcgacaacccattcctgcataccaccacctttggcggcaacccgctggcctgtgcggcggcgctggcgaccatcaatgtgttgctggagcagaacttaccggctcaggctgagcaaaaaggcgatatgttgctggacggtttccgtcaactggcgcgggaatatcccgatctggtacaggaagcgcgtggtaaagggatgttgatggcgattgagtttgttgataacgaaatcggctataactttgccagcgagatgttccgccagcgcgtactggtggccggaacgctcaataacgccaaaacgatccgcattgaaccgccactgacactgaccattgaacagtgtgaactggtgatcaaagcggcgcgtaaggcgctggcggccatgcgagtaagtgtcgaagaagcgtaatatcaaatcggatggcgatacgacgtcgccatccgatctttttatacgacgcgtacgcccgcaggcatcatccgctccggcgttaacagcacgctttcactgccgtcatcggtttccgcacacaacagcatgcattcgctcgtttcaccacgcattttcgctttttgcagattgcataagaccaccaccgttttccccatcagctcttcttcgctgtagtacggcaccaggctggtcacggtttgcagcgttttttgccccacatcaacctgtacgatgtacagcttgtcggcgttttcatggcgtttcacttccacaatctttccgacgcgcatttccagacgtgcaaaatcagcgtaagccacggtttccattgcttcctcccttagggtaaaattttactaaactatagcaaaagtttttctcaatcctgtaggctaaaaatggagaatgcaggcgtgatcacattcgtgagccgctgtgttaccgttacagcgtcaaagaaacgcgctttatttactgaaaacaggtgacccgataagcacttcctctacaatgggggcgcacatcagggaaagtaaaaaaggtaaacatggcaacactaaaagacatcgcaatcgaagctggcgtatccctggcgacagtatccagggtcttaaatgacgatccgacattgaatgtgaaagaagagacgaaacatcgcattctcgagatcgccgaaaagctggagtacaagaccagtagtgcccgtaaactccagacaggtgcagtcaaccaacaccatattctggctatctacagctaccagcaggagctggagatcaacgatccttactatctggcgatccgccacggcattgaaacccagtgcgaaaagctgggcatcgagctcaccaactgttatgaacacagcggcttaccagacattaaaaacgtcaccggtattttaattgtcggcaaacccacgcccgccctgcgcgccgctgccagcgcgttgaccgacaatatctgttttatcgactttcacgaacccggcagcggttacgatgcggtggatatcgatctggcacgcatcagtaaagaaatcatcgacttctatatcaaccagggcgttaatcgtattggttttattggcggtgaagatgagcctggcaaggcggatattcgtgaggtcgcctttgcggaatatggccgactgaaacaagtggtacgcgaagaggatatctggcgcggcggtttttccagtagcagcggttatgaactggcaaaacaaatgctggcgcgggaagactatccgaaggcactgtttgttgcttccgattccattgctatcggcgtactgcgggcaattcatgaacgaggcctgaacatcccacaggatattagccttatcagcgttaacgatatccccaccgcgcgatttacctttccgccgctctccaccgtgcgcatccattccgagatgatgggaagtcagggcgttaacctggtgtatgaaaaagcccgcgatggtcgcgcgctgccgctgttagtcttcgttcccagcaaattaaaactgcgcggcacgacccgttaaatccccttacacactgtccggcaatcgtttttgccggacagtgctgccgtttattttcgtgatccagttaaagtaaatgcatttacctgctactttttagtaaaaattttactaaactccccagcaattacacaaactaccatcaccatgaatggttccgatttctctctaccgggaggccctatgaatcgctgggaaaacattcagctcacccacgaaaaccgacttgcgccgcgtgcgtacttttttagttatgattctgttgcgcaagcgcgtacctttgcccgcgaaaccagcagcctgtttctgcccttaagcggtcagtggaatttccacttttttgaccatccgctgcaagtaccagaagccttcacctctgagttaatggctgactgggggcatattaccgtccccgccatgtggcaaatggaaggtcacggcaaactgcaatataccgacgaaggttttccgttccccatcgatgtgccgtttgtccccagcgataacccaaccggtgcctatcaacgtattttcaccctcagcgacggctggcagggtaaacagacgctgattaaatttgacggcgtcgaaacctattttgaagtctatgttaacggtcagtatgtgggtttcagcaagggcagtcgcctgaccgcagagtttgacatcagcgcgatggttaaaaccggcgacaacctgttgtgtgtgcgcgtgatgcagtgggcggactctacctacgtggaagaccaggatatgtggtggagtgcggggatcttccgcgatgtttatctggtcggaaaacacctaacgcatattaacgatttcactgtgcgtaccgactttgacgaagcctattgcgatgccacgctttcctgcgaagtggtgctggaaaatctcgccgcctcccctgtcgtcacgacgctggaatataccctgtttgatggcgaacgcgtggtgcacagcagcgccattgatcatttggcaattgaaaaactgaccagcgccagctttgcttttactgtcgaacagccgcagcaatggagtgcagaatccccttatctttaccatctggtcatgacgctgaaagacgccaacggcaacgttctggaagtggtgccacaacgcgttggcttccgtgatatcaaagtgcgcgacggtctgttctggatcaataaccgttatgtgatgctgcacggcgtcaaccgtcacgacaacgatcatcgcaaaggccgcgccgttggaatggatcgcgtcgagaaagatctccagttgatgaagcagcacaatatcaactccgtgcgtaccgctcactacccgaacgatccgcgtttttacgaactgtgtgatatctacggcctgtttgtgatggcggaaaccgacgtcgaaagccacggctttgctaatgtcggcgatattagccgtattaccgacgatccgcagtgggaaaaagtctacgtcgagcgcattgttcgccatatccacgcgcagaaaaaccatccgagcatcatcatctggagcctgggcaatgaatccggctatggctgtaacatccgcgcgatgtaccatgcggcgaaagcgctggatgacacgcgactggtgcattacgaagaagatcgcgatgctgaagtggtcgatattatttccaccatgtacacccgcgtgccgctgatgaatgagtttggtgaatacccgcatccgaagccgcgcatcatctgtgaatatgctcatgcgatggggaacggaccgggcgggctgacggagtaccagaacgtcttctataagcacgattgcattcagggtcattatgtctgggagtggtgcgaccacgggatccaggcacaggacgaccacggcaatgtctggtataaattcggcggcgactacggcgactatcccaacaactataacttctgtcttgatggtttgatctattccgatcagacgccgggaccgggcctgaaagagtacaaacaggttatcgcgccggtaaaaatccacgcgcgggatctgactcgcggcgagttgaaagtcgaaaataaactgtggtttaccacgcttgatgactacaccctgcacgcagaggtgcgcgccgaaggtgaaacgctcgcgacgcagcagattaaactgcgcgacgttgcgccgaacagcgaagcccccttgcagatcacgctgccgcagctggacgcccgcgaagcgttcctcaacattacggtgaccaaagattcccgcacccgctacagcgaagccggacaccctatcgccacttatcagttcccgctgaaggaaaacaccgcgcagccagtgcctttcgcaccaaataatgcgcgtccgctgacgctggaagacgatcgtttgagctgcaccgttcgcggctacaacttcgcgatcaccttcagtaaaatgagtggcaaaccgacatcctggcaggtgaatggcgaaagcctgctgactcgcgagccaaagatcaacttcttcaagccgatgatcgacaaccacaagcaggagtacgaagggctgtggcaaccgaatcatttgcagatcatgcaggaacatctgcgcgactttgccgtagaacagagcgatggtgaagtgctgatcatcagccgcacagttattgccccgccggtgtttgacttcgggatgcgctgcacctacatctggcgcatcgctgccgatggccaggttaacgtggcgctttccggcgagcgttacggcgactatccgcacatcattccgtgcatcggtttcaccatgggaattaacggcgaatacgatcaggtggcgtattacggtcgtggaccgggcgaaaactacgccgacagccagcaggctaacatcatcgatatctggcgcagcaccgtcgatgccatgttcgagaactatcccttcccgcagaacaacggtaaccgtcagcatgtccgctggacggcactgactaaccgccacggtaacggtctgctggtggttccgcagcgcccaattaacttcagcgcctggcactatacccaggaaaacatccacgctgcccagcactgtaacgagctgcagcgcagtgatgacatcaccctgaacctcgatcaccagctgcttggcctcggctccaactcctggggcagcgaggtgctggactcctggcgcgtctggttccgtgacttcagctacggctttacgttgctgccggtttctggcggagaagctaccgcgcaaagcctggcgagctatgagttcggcgcagggttcttttccacgaatttgcacagcgagaataagcaatgaggatcatcgataacttagaacagttccgccagatttacgcctctggcaagaagtggcaacgctgcgttgaagcgattgaaaatatcgacaacattcagcctggcgtcgcccactccatcggtgacagtttgacttaccgcgtggagacagactccgcgaccgatgcgctatttaccgggcatcgacgctattttgaagtgcattactacctgcaagggcagcaaaaaattgaatatgcgccgaaagagacattacaggtagtggaatattatcgtgatgaaactgaccgtgaatatttaaaaggctgcggagaaaccgttgaggtccacgaagggcaaatcgttatttgcgatatccatgaagcgtatcggtttatctgcaataacgcggtcaaaaaagtggttctcaaagtcaccatcgaagatggttatttccataacaaataacaactacggcggcaaaaggagtttgccgccaccgctaccctactcattttcggagatgtgttatgtctgataccaaacgtaatacaatcggcaaattcggcttgctcagcctgacttttgccgccgtttacagctttaacaacgttatcaataataatattgagcttggactggccagcgcaccgatgtttttcctcgcgacgattttttattttattcccttctgtctgatcatcgcagaatttgttagcttaaataaaaacagtgaagccggtgtctacgcgtgggtaaaaagtagcctgggcggacgttgggcatttattactgcctatacctactggttcgtaaacctgttctttttcaccagtctgttgccgcgcgttattgcttatgctagctatgccttcctcggatacgaatatattatgacgccggttgccaccaccattatcagtatggtgctgttcgccttctccacctgggtttccaccaacggggcgaaaatgttggggccaattacctccgtcactagtacgctgatgctgctgttaacgctctcctacattttactggcaggtacggcgctggttggcggcgtacagcctgctgacgccatcaccgttgacgcgatgatcccgaacttcaactgggcgttcctcggcgttaccacctggatctttatggccgcaggtggcgcggagtccgtcgctgtgtacgttaacgacgtcaaaggcggtagcaaaagcttcgttaaagtgatcatcctcgccgggatttttatcggcgtactgtattccgtctccagcgtgctgattaacgtcttcgtcagcagcaaagagttgaaatttaccggcggaagcgtgcaggtattccacggcatggcggcgtattttggtctaccggaagcgttgatgaatcgctttgtcggtctggtgtcctttaccgcgatgttcggttccctgctgatgtggaccgcaacgccggtgaaaattttcttctccgaaatcccggaaggcatctttggtaagaaaaccgtcgaactgaacgaaaacggcgttccggcgcgcgcagcgtggatccagttcctgatcgtcatcccgctgatgattatcccgatgctcggttccaataccgtgcaggatctgatgaatactattattaatatgaccgccgcagcgtccatgcttccgccgttattcatcatgctggcttacctgaatttacgcgccaaattagatcacctgccacgcgatttccgtatgggctcccgccgcaccggtattatcgttgttagtatgctgattgcgatatttgccgtagggtttgtcgctagcacattcccgactggcgcgaatattctgaccatcattttttataacgtcggcggtattgttatcttccttggctttgcgtggtggaaatacagtaaatatataaagggattaacggctgaagagcgccatattgaagcgacgccagccagcaatgttgattaagcagaataataaaaaatgagcaggcattttccctcttcctggatgaggagagggaaaatagtttctgcctttatatttttataattacaacgataaaaggctgtactttttctttagctcatggattaacacaatgaaattaatcactgcaccatgcagagcattacttgctctgccgttttgctacgccttttctgcggcaggagaagaagcacgtccggcagaacatgacgacacaaaaacacccgcaattaccagcacatcttctcctagttttcgtttttacggcgaattaggggttggtggatatatggatttagagggtgagaataaacataaatacagcgacggtacctatattgaaggtggcctggagatgaagtacggctcctggttcggcctgatttacggcgaaggctggaccgtgcaggccgaccacgacggcaatgcctgggtgccagaccatagctggggtggtttcgagggcggaattaaccgtttctatggcggttatcgtaccaatgatggcaccgaaatcatgctcagtctgcgtcaggattccagcctggatgacctgcaatggtggggcgatttcacccccgatctgggctacgtcattcccaatacccgcgacattatgactgcgctgaaggtacagaacttaagcggcaactttcgttatagcgtcaccgcgactcctgccggacatcatgatgaaagcaaagcctggctacattttggcaaatacgatcgctatgacgacaaatacacctatccggcaatgatgaacggttacatccagtatgaccttgccgaaggcatcacctggatgaacggtctggaaatcaccgacggcacaggacagctctatctcacgggcctgctaactcctaactttgccgctcgcgcctggcaccataccggacgcgccgacgggctggacgtaccgggaagtgaaagtgggatgatggtgagcgccatgtatgaagcgttaaagggcgtttatctctccaccgcttacacctacgccaaacatcgccctgaccacgctgacgatgaaaccacctctttcatgcagtttggtatctggtacgaatacggcggcggacgtttcgccacggcttttgatagccgcttctacatgaaaaatgcctctcacgatcccagcgaccaaatcttcctgatgcaatatttctactggtaataaggactgtaatttcatgaaaataaaaactattttaacgccagtaacctgcgctctgctgataagtttttccgcccatgccgctaacgccgacaattataaaaacgtgattaaccgtactggcgcgccgcagtacatgaaggattacgattacgacgatcaccagcgttttaatccgtttttcgatctcggagcctggcatggtcatctgttgccagacggccctaacaccatgggcggctttccgggcgttgcgctgctgacggaagagtacatcaactttatggccagcaatttcgaccgcctgaccgtctggcaggacggcaagaaagtcgactttacgctggaggcatacagtattcccggtgcgctggtgcaaaaactgacagcaaaagatgtgcaagtcgaaatgactctgcgcttcgccacgccgcgcacgagtctactggaaaccaaaatcaccagcaataaaccgctggatctggtgtgggacggcgaactgctggaaaaactggaagcgaaagaagggaaaccgctttccgataaaaccattgctggcgaataccctgactatcagcgcaaaatcagcgccacccgtgatggcctgaaagtcacctttggcaaagtgcgcgccacctgggatctgctgacctccggcgaaagcgaatatcaggtgcataaatccctgccggtgcagactgaaatcaacggtaatcgctttaccagtaaggcgcatatcaacggtagcaccacgctctacaccacctattcccatctgctgaccgctcaggaagttagcaaagagcaaatgcagatccgcgatattctggcgcgtccggcgttttatctcaccgccagccagcaacgctgggaagaatacctgaagaaagggttaaccaatccggatgcgacgccggaacagacgcgcgtcgcggtgaaagcgatcgaaacgctcaacggtaactggcgcagtccgggcggtgcggtgaaatttaacaccgttacaccgagcgtgaccgggcgctggttctccggcaatcagacctggccgtgggatacctggaagcaggcgtttgcgatggcgcatttcaatccggacatcgccaaagagaatatccgcgcggtcttctcctggcagatccagcctggcgatagcgtgcgtccgcaggatgtgggctttgtccccgacctgatagcgtggaaccttagccccgagcgtggtggcgatggcggcaactggaacgaacgtaataccaaacccagccttgccgcctggagcgtgatggaagtgtataacgtcacccaagataaaacctgggtggcagagatgtacccgaaactggtggcctatcacgactggtggttacgtaaccgcgatcacaacggcaacggcgtgccggaatatggcgcgacccgcgacaaagcccacaacactgagagcggcgagatgctgtttacggtgaaaaaaggcgataaagaagagacgcagtctgggctgaacaactacgcccgcgtggtggagaaaggccagtacgacagtctggaaattccggcacaggttgctgcaagctgggaaagcgggcgtgatgatgccgccgtctttgggtttatcgacaaagaacagttggataaatatgtcgctaatggcggcaaacgtagcgactggacggtgaaattcgccgaaaaccgcagtcaggacggaacgttgctgggctacagcctattgcaggagagcgtggatcaggccagctatatgtacagcgataaccattatctggcggagatggcaaccatcctcggtaagccagaagaggccaaacgctatcgccagttggcacagcagctcgcggactacatcaacacctgtatgttcgacccgactacccagttctactatgacgtacgtattgaagataaaccactggcgaacggctgcgcgggcaaaccgattgttgagcgcggtaaagggccggaaggctggagcccgctgtttaacggtgcggcaacgcaggccaatgccgacgcggtggtgaaggtgatgctcgatcctaaagagttcaacacctttgtcccgctgggaacggcggcgttaaccaatccggcttttggcgctgatatctactggcgtgggcgcgtatgggtggatcagttctggtttggtctgaaagggatggagcgttacggttatcgtgatgatgccctgaagctggcggatacgttcttccggcacgccaaagggttaaccgccgatggaccaattcaggaaaattacaacccgctgacaggcgcacagcaaggcgcaccaaatttctcctggagtgccgcgcatttgtatatgttgtataacgattttttccgtaagcaataatttgcaactgctggcggatgcggcgtaaacgccttatccgccctacatgtgcaatcctcctggccggataaaacgcggcaagcgttgcatccggcaactgcaccgcgccactggcggatgcggcgtgaacgccttatccgccctacatgtgtgttcccgtaggtcggataagacgcgacaagcgtcgcatccggcatctgcaccgcgccactggcggatgcggcgtggacgccttatccgccctacatgtgcaattccgtaacctggataaaacgcgacaagcgtcgcatccggcgttatcaccgggcgtattctttttgaatcccatcacaaaccccgcactccccttttcccttttctccggcgacggctaaattagaactcatccgaccacataacaattattttacatactggacaattttatgagctacccgagcctgttcgccccgctggatttaggttttaccacgttaaaaaaccgcgtgttgatgggcagtatgcacaccgggctggaggaatacccggacggtgccgagcggctggcagcgttttatgccgaacgcgcccgtcacggcgtggcgctgattgtcagcggcggcattgcaccagatttaacaggcgttggcatggaaggtggcgcaatgctcaacgacgccagccagatcccacaccatcgcaccattaccgaagcggtacatcaggaaggcggcaaaatagccctgcaaattttgcataccgggcgctacagctaccaaccgcatctggtcgccccgtccgcattgcaggcccccatcaaccgtttcgtgccccatgagttaagccatgaagagatcctgcaactgatcgacaatttcgcccgctgcgcgcaactggcgcgggaggcaggatacgacggtgtagaggtgatgggttccgaagggtatttgatcaacgaatttctgacgctgcgcaccaatcagcgtagtgaccagtggggcggcgattaccgcaaccggatgcgatttgccgtagaagtagtgcgtgcggtgcgcgaacgcgtcggcaacgacttcattattatctaccgactgagcatgctcgacctggtcgaagacggcgggacttttgccgaaacggtagagctggcgcaggccattgaagcggcgggcgcgaccattatcaacaccggcattggctggcatgaagcacgtattccgaccattgccacgcccgtgccgcgcggcgcatttagctgggtcacgcgcaaactgaaaggccacgtcagcctgccgctggtaaccaccaaccggattaacgatccgcaggttgccgacgatattctcagccgcggcgatgccgatatggtaagcatggcgcgaccgtttcttgctgatgcggagctgctgagtaaagcgcaaagcggacgagccgatgagatcaacacttgtattggctgcaatcaggcctgtctcgatcaaatcttcgttggcaaagtcaccagctgcctggtgaatcctcgcgcctgccacgaaaccaaaatgccaatccttcccgccgtgcagaaaaaaaatctggcggtggtcggtgcgggacctgctgggctggcgtttgccattaacgcggcggcgcgtgggcatcaggtaacattgtttgacgctcatagcgagattggcgggcagtttaatatcgccaaacagatccccggcaaagaggagttttacgaaacgctgcgctattaccgccggatgatcgaagtgacgggcgtgacgctaaaactcaatcacaccgtgacggcggatcagttacaggctttcgatgaaacgatcctcgccagtgggatcgtgccgcgcactccgcccatcgacgggatcgatcatccgaaggtattgagttatctcgatgtactgcgcgacaaagcgccggttggcaacaaagttgccatcatcggttgtggcgggattggttttgatacggcgatgtatttaagtcagccgggcgaatccaccagccagaatatcgccgggttctgtaatgaatgggggatcgacagtagcctacaacaggctggtggcttaagcccgcagggaatgcagatcccccgtagcccacggcagattgtgatgctccagcgcaaagccagcaaaccaggacaggggttaggcaaaaccaccggctggatccatcgcaccaccctgctcagccggggtgtgaaaatgatcccaggcgtaagttatcagaagattgacgatgacgggctgcatgtggtgatcaacggcgaaacgcaggtattagcagtggacaatgtggtgatctgcgcagggcaagagccaaaccgcgcgctggcgcaaccgctgattgatagcgggaaaacggtgcatttaattggcggctgcgatgtggctatggagctggacgcacgacgggcaattgcccagggaacacggctggcgctggagatttaaatcgttatttgaagcgccggatgcaacgcatccggcacgtcgcgttaatcaataaacaaggcgggagaaatgccgaatcgcgttgccaattttttagcgtgttccagcgttaatttcctcttcccgctcaaaacgcgactcaccatagatttactgccaatttccggcagatcggaaagggttaaaccatattgatccataagggtacgaatcacggctataccgccaggcatggcttgagccatggcattaaattccgcaaattcgggcgcactttcttcccacgcggttattttggcacacaccagatccagcaaggggttttcaggatcgttgagcagcagatgatctaccagttccagcgcctgggtgtattgttcctcgttctgaatacccgccagaaaaggtgccacagcagttagcttttctcctgcttgcaagatgtcggcaatcgcaatcattttttccccttagtacgatgaacagcggtaaagaaatcgtattctttatgcgtcataacttcacgtatgtagcacttttggctttcaaaaaagaccattgctacaacacgtaattcattgcccccaacattgaaaacataatgcttatccagatatttgaagttatccagagatgggaatactgcttttaaactctcaggttttttgaaatatcccttagcaatcgtgttccccagagccaccaactccgttttatgttgcgggtatttttccgcagcatctttcaatgctttttgagttatcaggtgcattcttcatcacgtccgttgacaaattggcaatatgataacatccgttgccagattggcaacggatgaatttatctgtgtgacggaagaataaacgtagaaaaacgctaaacaagagaatgtagacgatggtgacagggattttttgttttatggaagcgcgattccagaactgggcagacattgccggatgcgacgcttgccgcgtcttatccggcctggagtaacgtgctgaacgtaggccggataaggcgtttacgccgcatccggcaggtaactcccaatcttaccgacgacgtcccagcttcaccgctttcagtaccacaaatttattattcgtcgcaatagtggtgcagttgccgaaaatcttcttcagtttatggaagtaatccaggtgacggttggcaacgatatacagctcgccgttgattttcaggcagcggcgggcgtggtggaacatctcccaggcgacgttatcggtcagcgcatgttgttggtgaaacggcgggttgcagagcacagcattaaagcggaaaggctccacgccggagagcgcgttgttgatcataaactcgcagcgatccaacgcctctggcatgttggtttcaacgttcaaacggctggaagcaaccgccatcgggctttcatcgacaaacaccactttcgcctgcgggtttttatcaagcagcgtcagaccaataacgccattaccgcaaccgagatcgacaatctccccttcgagattctctggcagatgttgcataaagaagcgcgcgccgatatcaagcccggtgcgggagaagacattcgcatggttgtggatagtccagtcagtaccttccagcttccagctaacggtctgcggcgcatcggccagctgcggttcattgaaagtgcaattaatcaggcgcgcttttttccatgccagcgtggtggtggttgggccgagcactttttcgaacagttccagcgtggaagtgtgaatgtcacgggccttggcaccggcaataatacgtgtatcgctcgtgaccactttgcgcagcgcacgcagttgctgttccagcaatgccagtgttttcggcactttgatcagcaccacacccggctgttgcgggtagtcggcggtgctgtcgagaaacttcacgctgctctcatcaatcccgttgaggcgtaaattctcgcgcgtcgccagttcactgatgtaactgtcgccaatgctgtacggcttatgttccgccagtgcgcagcttaacgcaccaaaggcatcattcaggatcaacaccgggccgcggatttctgtgtcgtccaactgttgcagcaaatattcatccgccgcttcccacgcctgtagcgggttaacgtcatccgtcgccggaaaacgttgtagtgtcagactacggaaaccgttgtctaagtggctcatcggccctcctgaatgataaaatttcgacattgcccctgaaaagggtgcgtgagtataccctttttctctttttcgtgggcggttatgagcaatcttacttatcttcagggttatcccgagcagctactttcccaggtgcgaacactgattaacgaacagcgtctgggcgatgtgctggcaaaacgctatccgggaacacacgactacgccaccgataaagccctctggcaatatactcaggatctgaaaaatcagtttctgcgtaatgccccgccgatcaataaagtgatgtatgacaataagatccatgtgctaaaaaacgcgctcgggttacataccgctgtttctcgtgtgcagggcggcaagctgaaagcaaaggtggagatccgcgtcgctaccgtgtttcgcaacgcgccggaaccgtttttgcgcatgatcgtggtgcacgagctggcgcacctgaaggagaaagagcataacaaagcgttttaccagttgtgttgtcatatggaaccccagtaccaccagcttgagttcgacacccgactgtggctaacgcagttgagccttgggcagaacaaaatctgaaaatgatgtcaggcgttatcttttctttctttagcgcctaaaatcgacctcccccctttcgttaaggataacgaccatgctgcgcgcatttgcccgccttcttctccgtatttgtttttctcgccggactctaaagattgcctgcttactgttacttgtggcaggagcgaccatccttatcgccgatcgcgtaatggtcaacgccagcaaacagctgacctggagcgatgtcaacgccgttccggcgcgtaacgtgggtttattgctgggggcgaggccgggtaatcgctactttacccgacgtattgataccgcagcagcgttgtaccacgccggaaaagtgaaatggctgctggtaagtggcgataacggacgtaaaaattacgatgaagcaagtggtatgcagcaggctttgatcgctaaaggcgtaccagcaaaagtgatcttctgcgactatgccggattcagtacgctggatagcgtagtgcgtgccaaaaaggtttttggtgaaaaccatatcaccattatcagccaagaatttcataatcaacgcgccatctggctggcaaaacagtacggcatcgacgctatcggttttaacgcgccagacctcaatatgaagcacggtttttatactcaactgcgggagaaactcgctcgtgtcagcgccgtgattgacgccaaaatcctccatcgccagccgaaatatctcgggcctagcgtcatgattgggccgtttagtgagcatggctgtccggcgcagaaataatgcgtatctgcgcacgtcgaagatgaaaaaggcgtgctacattgacgacagaatccctttatggagtatccacgcgttatgatacgtttcgctgtgattggtacgaactggatcactcgccagttcgtcgaggccgcccatgagagcggtaaatacaagttaaccgccgtatattcccgcagccttgaacaggcccagcacttcgccaatgatttttctgtcgagcatctgtttaccagcctggaagcgatggcggaaagcgatgccattgacgcggtgtatattgccagcccgaattccctgcatttttcccagacacaacttttccttagccataaaattaatgtgatttgcgagaaaccgctggcgagcaatctggcggaagtggatgccgccattgcctgtgcgcgggaaaatcaggtggtgctgtttgaggcatttaaaaccgcctgcctgccgaactttcatttgttgcgccaggcgctgccgaaagtcggcaaactgcggaaagtctttttcaactattgccagtattccagccggtatcaacgttacctggatggtgagaatcccaacacctttaatccggcattctctaacggtagtattatggatatcggtttttactgtctggcgagcgcggtggcgttatttggtgagccgaaaagcgtgcaggcaaccgccagtttgctggcaagcggcgttgacgcccagggcgtggtggtgatggattacggtgatttcagcgtcaccttgcagcacagtaaagtcagtgattctgtcctggcgagcgagattcagggcgaagcaggaagcctggtgattgaaaaactgtctgaatgccagaaagtgtgcttcgtgccgcgtggcagccaaatgcaggatctcacccagccgcagcatattaataccatgctctacgaagcagagctgttcgctaccctggtggatgagcatctggtggatcatccagggctggcggtcagtcgcatcaccgccaaactgctgaccgagatccgccgccagactggggtgatttttccggcagatagcgtaaaactataattgccaaagtaaaacagtgtaaaaggtatgtaacagaccattgactggctgaatggtctgtcatactttgttacctgcaaaggggagtaacttcattgccggtcgatcgtcattacgatgtgtgaaaaaacacatccggtcaccgggcaacccgaaaggaatacgcagacgtattccttttttgttgtaagtgagaccttgccggaaggcgaggtctatgcataaaaagcagcggctgacgtcttccgacgttggccgtttttttatgtgtaaggaacttctatgaatactgtcggcacgccgttgctatggggcggattcgctgttgttgtcgccattatgctggctatcgacctgttgttgcaggggcgtcgtggggcacatgccatgaccatgaaacaggctgcggcctggagcctggtctgggtgacgctgagcttactgtttaacgccgctttctggtggtatctggtgcaaaccgaaggtcgcgccgttgccgatccacaggcactggcctttctcacaggttatctgattgagaaaagcctggcggtcgataacgtctttgtctggctgatgttgttcagctatttctctgttccggcggcattacaacgccgcgtgctggtgtatggcgtgctcggggcgattgttctgcgtaccatcatgatcttcactggcagctggctaattagccagttcgactggatcctgtatatcttcggtgccttcctgctgtttaccggcgtgaagatggcgctcgcccatgaagatgaaagtggcattggcgacaagccgctggtgcgctggctacgcggtcatttgcgcatgaccgacaccatcgacaacgagcatttctttgtgcgtaagaatggattgctgtacgccacaccgctgatgctggtactgattctggtggaattgagcgacgtgattttcgccgtggatagcattccggctatcttcgccgtgaccactgacccgttcattgtgctgaccagtaacctgtttgcgatcctcggcctgcgtgcgatgtatttcctgctggcgggcgtagcagagcgtttcagcatgctcaaatatggcctggcggtgattctggtgtttatcggtatcaagatgctgattgtcgacttctaccatattccaatcgccgtcagcctgggcgtggtgtttggcattctggtgatgacgtttattatcaacgcctgggtgaattatcggcatgataagcagcggggtggataatttttaatctgcctaagccgtgtaccctgtcattaacatgagcaccgttttctccctctcccttccagggagagggtcggggtgagggtaatttttcgcaccgatgctggcctgttcccctcaccctaaccctctccccaaacggggcgaggggactgaccgagtccttttttgatgttgtcatcagtctggaagccgcacgttggctttatttttatgtcaaagaaatgtaaccattaagtttcaaaatatgacctctctttaaaatccagcatttttcgcttcccgaagctgtaactttccttatactcgaccttgcaaacactttgttacatcctgaaagatgcgtcgacagaacgcaccagggatgtgcgacaacacaatgaaaggatcgaaaaatgactacgcaacgtagtccggggctattccggcgtctggctcatggcagcctggtaaaacaaatcctggtcggccttgttctggggattcttctggcatggatcagtaaacccgcggcggaagctgttggtctgttaggtactttgttcgtcggcgcactgaaagccgttgcccccatcctggtgttgatgctggtgatggcatctattgctaaccaccagcacgggcagaaaaccaatatccgccctattttgttcctctatctactgggcaccttctctgctgctctggccgcagtagtcttcagctttgccttcccttctaccctgcatttatccagtagcgcgggtgatattagcccgccgagtggcattgtcgaagtgatgcgcgggctggtaatgagcatggtttccaaccccatcgacgcgctgctgaaaggtaactacatcgggattctggtgtgggcgatcggcctcggcttcgcactgcgtcacggtaacgagaccaccaaaaacctggttaacgatatgagcaatgccgttacctttatggtgaaactggtcattcgcttcgcaccgattggtatttttgggctggtttcttctaccctggcaaccaccggtttctccacactgtggggctacgcgcaactgctggtcgtgctggttggctgtatgttactggtggcgctggtggttaacccattgctggtgtggtggaaaattcgtcgtaacccgttcccgctggtgctgctgtgcctgcgcgaaagcggtgtgtatgccttcttcacccgcagctctgcagcgaacattccggtgaatatggcgctgtgtgaaaagctgaatctggatcgcgatacctattccgtttctattccgctgggagccaccatcaatatggcgggcgcagcaatcactattaccgtgttgacgctggctgcggttaatacgctgggtattccggtcgatctgcccacggcgctgctgttgagcgtggtggcttctctgtgtgcctgtggcgcatccggcgtggcgggggggtctctgctgctgatcccactggcctgtaatatgttcggtattagcaacgatatcgccatgcaggtggttgccgtcggctttatcatcggcgtattgcaggactcttgcgaaaccgcgctgaactctagtactgacgtgctgttcactgcggcagcttgccaggcagaagacgatcgtctggcaaatagcgccctgcgtaattaattgtttaacccctttcgtctacggcggaaggggttttctcaactttaaacggatcaattccccttttctgcatccgccagaaacgaatgatattcaggccattcataagcagaaaactaccctcaatcatcgtgccgcctatgctccccgcccagaagttgtgaatcacccagcaacacgtactaaaccacattacgcagcgcatggtcagccctttacagcagaatagcgcccaggtactgacaatcgtgccgataaccggcaatagttcgacaggatgatggaacttcgcgaggccaattccgccagtcagcacaataaaaatcgccattacccataagctgcgcgtgcgtaaggtaatcaatgtacgaatggcattaaggatggcactggcaccagcgggataggtgcccagaagaaaaaaatgtacgccaataacggcgctatagacgctaagctgctttttgaagcgacgttcgtcacgattgaaaaatgttgtgataccaatcagaaaggcgatgacacccacgccctgggccagccaatacgcggtcatgataaatccttagcaggtatggaaaagcaaacggcgcttcacattatgaaacgccgttttttattaacaactcatttcgactttatagcgttacgccgcttttgaagatcgccagttcgcggaagtcgttacgctcgttacaggtttgcttaccgttggcaaactcaacgatggtgtcgataaattcttccagcaactgcggcatcgctttaccgtggatcaactgacccgcgtcaaagtcgatccagtgttttttcttcgccgccagttcactgttggtggcgattttcaccgtcggcacaaatccaccatacggcgtgccacgaccagtactgaacagcaccatatggcagcccgcacccgccagggcgctggtcgctacggcatcgttacccggcgcacttaacaagttcagccctggcgttttcagacgctcgccgtaacgcagcacgtcaaccacgacgctggaacccgctttctgggtacagccaagacttttgtcttccagcgtggtgataccgcccgctttgttccccgggcttgggttttcatagatcggctgatcatgggcaataaagtactgtttgaagtcgttgaccatggtgaccagtttttcaaacgttgcttcgtcgcggcaatggtccatcagcaactgctctgcgccaaacatctccggcacttcggtcagtacggtagtaccgccgttagcaatcacgtagtcagagaaacgccccagcatcgggttagcagtaataccagaaagaccgtcagaaccaccgcactccagaccaaacttcagttcgctgagtttgcctggctcgcgtttatcgttgcgcatcacgttatacagctgatgcaaatgctcgattccggcttcgatctcatcatcctgctgttggcagatcatgaaatgaacgcgttcaggatcgatatcgcccagcgtttcacggaatgcggcaacctggttgttttcacagcccagaccaatcaccagcactgcgcctgcgttcgggtggcgcaccatgttttgcagcatggtgcgggtattaatgtgatcgtcgcccagctgactgcagccgtaggtgtggctgaagaggaacacgccgtcagtaccttcggcgttgttggtctctttcagaaaacggttctggatctgccgcgcgatgccgttgacacagcccacggttggcaggatccacagctcattacgcaccccgacatcgccgttagcgcgacgatagatctgcacttcacgatctgccgcttgcgcaggcagatcctgaaaatcaggttgatagcgatactgatccagatcgctcagattcgtgcgcgtattgtgggcgtgaacgtgaacacctgccgcaatatccgccaatgcataaccaatcggcaggccatatttgatgacattggccccttttgcgatatccgttaacgcaaatttatgtccacgagcaacatcctggcgcagcgtaacagtctggttatcgacactgacttctgtgccttcagccaaatctgctaaagcgaccgcgacgttatccagcgcatggatcttgatgtattgcatatcaaccccagaccttagttcagttcaatggcgaagtagtcacgcgcattgttaaagcaaatatttttcaccatctcgcccagcaggttgatgtccgccggtgcttcgcccgcttccacccagcgaccgatcatctggcacagaatgcggcggaagtattcgtgacgggtgtaactcaggaagctacggctgtcagtcagcataccgacaaagcggctcagcagaccgagctgcgccagttgggtcatctgacgttccataccgtctttctgatcgttaaaccaccagccggaaccgaactgcattttgcccggcataccttcgccctggaagttaccgatcatggtgcccagcacttcgttatcgcgcgggttcaggcagtacagaatggttttcggcagcaggttttcttcattctgcttgctcagcaacttagacagctcttccgccatcggacggtcgttgatggagtcaaagcctacatccggccccagcagtttgaactgacgcaggttgttattacgcagcgcgccaatgtggtactgctgtacccagccgcgacgtgcatattcggcaccaaggaacaccagtaccgcagttttgaactgcgccacttcgtgctcgctcagggtttcgccagccagacggcgcgccagaatgctgtccagttccgcttcgttcgcttcagcaaacatcaccacatccagcgcgtggtcagacactttacagccgtgagcggcgaagtgatccagacgtttggtcagggcagtttgcaggtcagcaaagcggcgaatgtcggtatcggaaacttcgcccagcttcgccatgtagtcgttaaaggtcgcctgttcgatgttgaaggctttgtccggacgccagctcggcagcactttgatggtgaaagagccgtctttggcgatctctgcgtgatgctccagagaatcgatcgggtcatcggtggtgccgaccattttcacgttcatctgctgcatgatgccgcgcgcggagaagttatcctgcgccagcagttcgttacattcgttccagatttcatcggcagtactcggagaaagcaatttgccagtgataccaaacggacggcgcagttcgaggtgcgtccagtggtataacgggttgccgatagtgtgcggaacagtcgccgcccaggcgtcaaatttttcacggtcagacgcatcaccggtacacagacgctcggccacaccgttggtacgcatagcgcgccatttgtagtgatcgcctttcagccagatgtcatacaggtttttaaaacgatagtcttccgcaatctgctgcggcggcaaatggcaatggtaatcgaaaatcggctggtcttttgcgtagtcgtgatacagacggcgggcaaattcggtatctaacaggaaatcttcagtcataaacggagtcattttcgtcttcctctcaacgagtgagctagcttgcttatggtgcgatgctgacaaagttatcacaccaatttccagagtccgaagatattttcgtgagttagatcaataaacgtagttaaaaaaattactctcaaagtggtaaatctcgctgcaggccgcgccagtactggccttgctgtcgtcaggtaatgtccctacaaatattcccacatttgtgatggctctcaccttttaaagttgtatgacaagttatctttctgccgtcgcaaatcataagtcgacggaatgcaaattgccgattcattcatttgttagatgaatcgggttaaccggtacggaagccgaattagcacgaaactttcatggcaacgttcggggcgtgccggttttttttcggttacccggtcgtaactaacatcttcagcctctggcgggatgatggccgcgcttcctgcggatataacaaaacgatgaggttttacatgcgtaaaattaaagggttacgttggtatatgatcgcactggtgacgctcggcaccgtgcttggttacctgacgcgtaacactgtggcggcagctgcgccaactctgatggaagagttaaacatctccacccaacagtattcctatatcatcgcagcctattctgctgcttatacggtcatgcaaccggtagcaggttatgtactggatgtgctgggtacgaaaatcggttatgcaatgtttgctgtgctgtgggccgtgttctgtggtgcaaccgcgctggcaggtagctggggtggcctggctgttgctcgtggtgcggtcggtgccgcggaagcagcgatgatcccggcgggtctgaaagccagctccgaatggttcccggcgaaagagcgttccatcgcagtaggctactttaacgtaggttctagcattggtgcgatgattgcgccgccgctggtggtatgggcaatcgtaatgcacagctggcagatggcatttatcatctccggtgcattgagctttatctgggcgatggcatggctgattttctataaacatccgcgcgaccagaagcatctgaccgatgaagaacgcgactatattattaatggtcaggaagcccagcaccaggtgagcacggcgaagaaaatgtccgttggtcagatcctgcgtaaccgtcagttctggggtatcgcgctgccgcgtttcctggcagaaccggcctggggtacttttaacgcgtggatcccgctgttcatgtttaaagtttacggctttaacctgaaagagatcgcgatgttcgcctggatgccgatgctgtttgctgacctcggttgtatcctcggtggttacctgccgccgctgttccagcgttggtttggtgtgaacctgatcgtttcccgtaagatggtcgtaacgctgggtgcagtgctgatgattggcccgggtatgatcggcctgttcaccaacccgtatgtcgcaattatgctgctgtgtatcggtggttttgcccaccaggcactgtctggcgcgctgattacgctctcttccgatgtgtttggtcgtaacgaagtggcaacggcaaacggtttaaccgggatgtccgcatggctggcaagtacgctgtttgcgctggttgtcggtgcactggctgacaccatcggcttcagcccgctgttcgcagttctggcagtgttcgacctgttaggtgcgctggttatctggaccgtgttgcagaacaaaccggcgattgaggtggcgcaggaaacacataacgatcccgcaccgcaacattaacgtttcgtgtaagttttagtttcccttcaaagccgccttctcaggcggctttttcatcactgcgagtagagctaaactcgcaaaagtggtataacaaatatagtctgccgtatcatgcctggagcgcatatggaaatcactgaaccacgccgtttgtatcaacaacttgccgctgacctgaaagagcgcatcgaacagggcgtctatctggtgggtgataaactgcctgcagaacgctttattgccgatgaaaagaacgtcagccgtacggtagttcgtgaagccatcatcatgctggaagttgaaggctatgtcgaagtgcgtaaaggtagtggtattcatgtggtttccaaccagccgcgccatcagcaggcggctgacaataatatggaattcgccaattacggtccgtttgagttgcttcaggctcgccagctcatcgaaagtaatattgccgaattcgcggcaactcaggtaacgaaacaggacatcatgaaactgatggccattcaggaacaggcgcgcggcgaacaatgcttccgtgattccgagtgggatttgcagttccacattcaggtcgctctggcgacgcagaactccgccctggcggctatcgtggaaaaaatgtggacccagcgtagtcataacccgtactggaaaaaactgcacgaacacattgattcccgtaccgtcgataactggtgtgatgaccacgatcaaatcctcaaggcgctgattcgcaaagatcctcatgctgctaagctggcaatgtggcagcatctggaaaacaccaagatcatgttatttaacgaaaccagcgacgacttcgagttcaatgccgaccgctatctattcgccgaaaacccggtggtgcatctcgatacagccaccagcggcagtaaatgaaattcctgtccgacaggcgctgcaatgcgcctgtttgtctcgtcggtaagcgaaaagtataaagtgtcagcctgtgtaaatcctctcgccaccctcccctgcattcagcaaaatcagactccacggacatgtaattttgataacgaacaacgttgacctttgttacaattagattcaatttgaatttatgtttttgaatgctttcttatctcacgatttaacagggaatagttcaggctgtgttgatgtatcaaacccgcagaacataccaaaacagcaataacattgcggtagtgcatcttttaaaaccagcgtggcgttaaccgattcaccaggaataatgaatggaacttttgacccaattgctgcaagccctgtgggcgcaggattttgaaaccctggccaatccaagcatgattggcatgttgtattttgtcttgtttgtaattttgttccttgaaaacggcttgcttccggcggcctttttaccgggcgacagtttactggtattggtcggcgtgttgattgcgaaaggcgcgatgggctatccgcaaacgattctgctgctgaccgttgccgccagcctcggctgctgggtcagctatattcaggggcgatggctgggcaatacccgcaccgtacaaaactggctatctcatttacccgcgcattatcatcaacgcgcacaccatctttttcataaacacggtttaagcgcgctgttaattggtcgctttattgcgtttgtcagaacactgctgccgacgattgccgggttaagtgggctgaataacgcgcgctttcagtttttcaactggatgagcggtctgctgtgggtattgatcctgacaactctgggttacatgctcggcaaaacgccggtatttttaaagtacgaggaccagctgatgagttgcctgatgctgctcccggtggtgctgctggtgtttggcctggcaggttctctggtcgtgttatggaaaaagaaatatggaaatcgggggtaagggatgcaaatacctcgcatgagccttcgccagctagcctggtccggcgctgttttacttctggtcggcacgctgttgctggcctggtccgcggttcgccagcaagagtctacgctggcgattcgtgccgttcatcaaggcacaacgatgccagacggttttagtatctggcatcaccttgacgctcatggcattcctttcaaaagtatcacccccaaaaacgacactctgttaattacatttgactccagcgaccagagcgccgccgcaaaagcggtcctcgacagaacattgccccatggctacatcattgcgcagcaggacaataacagtcaggctatgcagtggctgacccggttacgggataactctcatcgcttcggataacttcctgttatccgaaacatatcactcactttggtgatttcaccgtaactgtctatgattaatgaggcggtggttaacactaccgcttcgttgtctggacaatcgttcctttgtaataggtccgaatcacaatggaaggttcaagaatgaaataccgcatcgctttagctgtttctctctttgctcttagtgccggtagttatgccactaccctgtgtcaggaaaaggagcaaaatatccttaaggagatcagctatgccgaaaaacaccaaaaccagaatcgtattgacggtctgaataaagccctgagtgaagtccgggccaactgtagtgatagccagctgcgtgccgatcatcagaagaaaatcgcaaagcagaaagatgaggtggcggaacgccagcaagatttagccgaggcgaagcaaaaaggcgatgccgataagattgccaaacgcgaacggaaactggcagaagcgcaggaagagctgaaaaagctggaagcgcgcgactactaactcacaatagtcactacttactcacctggagaaaactatgagcaaagaacacactacggaacatctgcgtgctgagttgaaatccctttccgatacgctggaagaggtgcttagcagttctggcgagaagagcaaagaagagttgagtaagattcgtagcaaagcggagcaggcactgaaacagagccgttatcgcctgggtgaaaccggtgatgccattgccaaacaaacccgtgtcgcggcggcgcgtgccgatgagtatgtgcgcgaaaatccgtggacgggcgtgggcattggcgctgcaatcggtgtagtgctcggcgttctgctgagccgtcgttaattatggcggacactcatcacgcacaagggcccggtaaaagcgttctgggcatcgggcagcgaattgtttctatcatggttgaaatggtagagacacgtctgcggctggcggtggtggagctggaagaggaaaaagcgaatctctttcaacttttactgatgctgggcctgacgatgcttttcgctgcatttggtcttatgagcctgatggtgctaattatttgggcggttgacccgcaatatcgcctgaatgcgatgattgccaccaccgtggtgttgctgctactggcactgattggcggtatctggacgctacgtaaaagccgtaagtctacgttgctgcgccatacacgccatgagttagcaaacgatcggcagctgctcgaggaggagtcccgtgagcagtaaagtcgaacgtgaacgacgtaaggcgcaactgcttagccagatccagcaacaacggctggatctttccgccagtcgtcgtgaatggctggagacaacaggcgcttacgatcgtcgctggaatatgctgctaagtctgcgctcctgggcgctggttggcagtagcgtgatggcgatctggacgattcgccatcctaatatgctggtccgctgggccagacgcggttttggcgtatggagcgcctggcgtctggttaaaacgaccctcaagcagcaacagcttcgcggttaacttccctctggccggagccattccggccttatccctcaaattttttgaagatttttgacagttttccttgctaacaatcatcattcaccacgtttatgattctctccatcgacagcaacgacgctaataccgcgccattgcacaaaaaaacaatcagcagcctgagtggcgcagtggagagtatgatgaaaaaattagaagatgttggtgtactggtagcgcgcattttaatgccgattctgtttattaccgctggctggggaaaaattactggctacgcgggtacccaacaatatatggaagcaatgggcgtcccgggttttatgctgccactggtgattctgcttgagtttggtggtggtctggcaatcctgttcggtttcctgactcgcaccacagccctgtttactgcgggctttacgctgctgacggcatttttatttcacagcaactttgctgaaggcgtcaacagcctgatgttcatgaaaaacctgacaatttctggcggattcctgctgctggcaattaccggtccgggcgcgtatagcatcgaccgcctgctgaataaaaagtggtaagcacgcgctatacttaacgataaaaaacgaggaggaagctcctcgtttttgctattggaggagagaaaaatgggtcaactgattgacggcgtctggcatgacacctggtacgataccaaatctaccggcggtaaatttcaacgtagtgcttccgcatttcgtaactggctcactgccgatggcgctcctggccccactggcacaggcggttttatcgcagagaaagatcgttatcatctctatgttagtctcgcctgcccgtgggcgcaccgcacgctgatcatgcgcaaactcaaaggactggaaccgtttatttccgtttccgtagtgaacccgctgatgctggaaaacggttggacctttgatgacagttttccgggagcaaccggagacacgctctatcaaaatgaatttctgtatcagctttatctccacgccgatccacactacagcggacgagttactgttcccgtgctgtgggacaaaaagaaccacaccatcgtcagcaacgaaagtgcagaaatcatccgcatgttcaataccgcgtttgatgcgctgggcgcgaaagcgggtgattactaccctccagccctgcaaacaaaaattgacgaacttaacggctggatttatgacaccgttaacaacggcgtgtataaagctggttttgccaccagccaggaagcttacgacgaggcggtggcgaaagtgtttgaaagcctggcacgactggagcagattttaggccagcatcgttacctgaccggcaaccagctaaccgaagccgatattcgcctgtggactacgctggtgcgttttgatccggtgtatgtgacccacttcaagtgtgataagcaccgcatcagcgattacctgaatctgtacggttttctgcgcgatatctaccagatgccggggatcgccgaaacagtcaatttcgatcatatccgtaatcattacttccgcagccataagaccatcaaccctacggggattattagtattggtccgtggcaggatctcgatgaaccgcatggacgagatgttcgcttcggttaaaaaaaggcaccttacgaggtgcctctgataattagctaagtgcatgttgttcatgtcggatgtggcatgaacgccttatctgacatacaaaacattgtacattcaatagattgcataacccgcgcagaccagataagcgtagcgcatctggcgattttgcgcttgtcatcagtcttagcgcgccttcacggcactttattaattccttgaacgaatatttactgccatttcattcacgtctattcttaatttgctgctttaaaaacaagtgattgagcaaaattgaggcaaaaatggactggtatctgaaagtactaaaaaattatgtcggtttccggggtcgtgcgcggcgcaaagagtactggatgtttattctggtcaacatcatctttacgttcgtgctggggctgctggataaaatgttaggctggcaacgcgctggtggcgaaggcatcctgacgacaatctacggtattctggtgtttttaccgtggtgggcggttcagttccgccgcctgcacgacaccgaccgcagcgcgtggtgggcactgctattcttaatcccgtttatcggctggcttattatcatcgtctttaactgccaggcgggtacgccaggcgaaaaccgctttggaccagatccaaaactggaaccttaaaacaaatctgctcgccggatgtctgactcatccggcttttatcattatgttgatgaatgaataatttactaatgtttatttaaaatatttcaatgtcgttatataaattacctataaaaaataaccatgtatttatcttaaatatcaaaacctttataacatccgaaaaagaaagatacgaatagcatttacacaatacccggaatagactttcgtcacttttaattaaagggatgtttttatgcagtggtatttgtccgtattaaaaaattatgttggtttctctggtcgcgcacgtcgtaaagagtactggatgtttactctgattaacgccatcgtcggcgctattatcaatgtcattcaattgattttaggtctggagcttccatatctgtctatgctttatttgctggcaaccttccttcccgtccttgcgcttgctatccgtcgcttacacgataccgaccgtagtggtgcctgggccttgctcttttttgttccgtttattggctggctcgtgcttctggtttttttctgcacagaaggtacttctggcagcaatcgttacggaaacgatccgaagtttggtagtaattaatcttagaattggggcgatatttcgcccctttttattaacaataataaatattattttccgttaaaaagtttgggaatttcccgcagacaccaggatttcgcttcccccatactgtcacgacgccaggccataataatatcgatctcgctggtgctttccgggctgacgacacgcaaccgcccttccgcaatatctttttcgaccataggatacggcatcgtcgccacgccaagccccgccagtaatgcctgacgtttatcttcaatcgtgctcaccgttaagcgcggctgtttgtccagcagctgtacggtcaacaccgggcgctcacgagcggtatccgccaccgcaattccacgatatttcacacgcgtcacttcagataacggttccggctcctgatgaatcgggtgatcaggcgcggcaacgtagacgttcattaacgtatagagcttgcggctgttgatctcgctgctggaacgaaaatgcatatccggcgcgataacaatatccgcccgcccctgctccagccgttcccacgcccccgccagcacttctgtgatgattgccagttgggtattggcttttgccgccagtttgtcgattaacgggaaaaaggcaggtgtcggtaccagcgcttcggtcacaatggtgagatgcgtttcccaaccgcgcgcgagagcttccgcatcagtagtcagtttatctgcggcttccagcaaaacgcgccctcgctccaacaacatcctcccgacattggtgaatttggtacgatggccgctgcggtcaaacagcaccacatccagctcttcttccagtttttgcatggtgtagctaagtgcggaaggcacgcgtcccagctcatccgccgccgccgcaaaactgccccggcgatcgatcgcatccataacccgtagtgcttccagcgttaatgccctttctttggccatttcgttctcattcaggaaatttgaacataccgggcagaatatctggctaacaatgtagcgtccagccccttaccataaaaggaagtaaagagaggtcaagaattatgattactacccgaactgccaggcagtgtggacaagcagactacggatggttgcaggcccggtatactttttcctttggacactacttcgacccgaaattgttaggctatgcctccctgcgtgtgcttaaccaggaagtgctggccccaggtgccgcctttcagccgcgaacctatcccaaagtcgatattttaaatgtgattctggatggagaagcagagtatcgcgatagcgaaggcaatcatgttcaggccagcgccggagaggcgttgctgctctctacccagccgggtgtcagctatagcgaacacaatctcagcaaagacaaaccgttaacgcgaatgcagctttggctggacgcctgcccgcagcgagagaatccgctgattcaaaagctggcgcttaatatgggcaagcagcaattaatcgccagcccagagggtgcgatgggaagcctgcaattacgccagcaagtgtggctgcaccatatcgtgctcgacaaaggcgaaagtgcgaatttccagttgcatgggccacgcgcgtatttgcaaagcattcacgggaaatttcatgcgcttacgcatcatgaagagaaagcggcgctgacctgcggtgatggggcgtttattcgtgacgaggctaacattacgctggttgccgattccccactgcgcgctttgctgatagatttgcctgtctaattgtttttacagggagatgatgatgagtaaaaaattggccaaaaagcgccagccggtgaagcccgtggtggcgaaagaacctgctcgcaccgccaaaaattttggctatgaagagatgttgagcgagctggaagctatcgtcgcggatgctgaaacgcgtttagccgaggatgaagctaccgcgtaaagacaggttgccggatgcggcgaaaacgccttatccggcctacaaaatccaacaacattaacgaattaaacaacccgtaggccggacaagatgcgccagcatcgcatccggcacgatccccaaaacctggcgtttatctggccttgctcgccataatctcgataatctgccgatccgtttgctgcatgctatggcttgctaacgcacacaggttggcaatgctctgctcaacatcatgcgccacaatcccttcattgccggtcacggcggtatcatccagcgccattaacaccgctttccacgcagcgctagcactggtgctaaccttcatcgcgcagctgttgctcgcaccatcgcaaatcatgccgctgacatcgccgatcatactgctgatcgccatgctgatggtttcataacgcccatccaccagccatgccatcccggcggcggcccccattgctgcggtcgttgcggcacacagcgcagacaaacgcggtaactggttatggatgtaaattgcgctcaaatggctaagcatcagcgcacgcgccagccgttcatcatccgctccgaagtgttctgctaccaccaccacaggcattgttgcggtaatcccctggttaccgctgccggagttactcatagccggaagcgtagcgccgcccatacgcgcatcggatgccgcgctggtacgaatcacaatggaactagagagatctttcgccagcaaaccgcgctcgcactgtttttccagcgtcgcgccaatatgcagcccccacttaccgctcaaaccttcctggcttaacgcacaatttagcttcgcggaatcgagaataaagcggatcgccgcaaacgggacttcattgacgaacttcaggatctcagccagcgtcgttctggaaagcaccgtcagcggagactcttgctcgccctctgccacacacgcctgctgggtaaacaccacaccatcgtgcgtctcgatatgcacaatgttggtatgcccgccgacgatggtgacacacgcccacttctcaccgttccagactttggcgcgactgaagaggatttcatcgcaaggttcctggatcttaacggagactttccccgccgccagcagtgctttggcatcggcaattgcctgcgctgttgcgtctttcagcacttccagcccggcgttggcatttccacctaacgcccccagcgccgccgcaatcggcagccccaccattcccgtgccgggaacggtgacgcccagaccgttcttcatcagatttgggctaacccaggcttctacacgttcaaccggaccttccagttctgccgcagcaaccgccgccgccagcgccagactaatcggttcagtacatcccagcgccggttttacttcctcctgaacggcgaggatgtaacgctgccataacggatttaaagtgctatcaaacatattaaaaaccttaaaatttcaggtaaatcaagaaaatgccaggaacggagaaacacacagcaacaaaccagtgacgataatcaggtacagagacatccctttgtatttgtgcaatgctggtactttgtaaaccagccacgccgggatcaggcaccctaccatgccgaaaatcgggctacagatagaggtgaagctcaacaccggtgcgttcagtacgatggcgctccaggccagcaaaatggcgaaaatcatgatgccgcgctgaacgagattttcgttaatcttctcggcaggcatcttgcgacgcaggatgttcattacgatcccttgcgttgcttcgcgaaagcctaaatagacgccaaagaatgcagtcatgacagcaaagatattgagaatgacgctgaccactttcacccacgctgcgccgtcaccgctaataaactgtgcggcaatcgccagcgcggaaatattctgctcataggcttttaccgcttcgtcatgtcccatcgccagcgtgaagctcacggcgtagaaaaagacggtgacaaacaaaatgccaaacgcgatattcattgcccgcaatgctttatgccgcgccacttcaatacttttttcccggctgcgataagagatcaccatcggacttaacgtctggataaacagaatgctcgtcagggtaaacggcagcgtaataatggcgtttttcaccagcagccccagcggcggtaggctaccgacgttatacagatgccacattcccaccatgctcacgcccagcgccgcgaccaccagcagcttggtcagcaccatgccggtgctaattttgaataacaatttctcgccgcgactggagatcgccaccagaatgcaaatcagtaccagaccataaaagggactgtcactcagcaacccttccgtcacgccgaaggtatgcaggtaggaagcactatcgttggtgatggcggtggaatagacgaacatccaaatcaccagcattacgaaatagagcgcacctaacaggatgccccagtttttacctaaataaccgctaatgacgctcgggtaatctttacattctggactttctgccagcgtattaataaacaatcgctgaaacagatacattgccgggtaaccaatcacgctactgagcaaaaatacccacaatcccatcaaaccgacctgcaccgggagaaaaacaatccccgcgccaatcgccatcccgatactcataatcacccagccggtgtcagtactgtcgaatttgatcgcttctcgccactcgctctcactcattccagcacgacccgccggggtcgaagcgtctgcaatgacgcctttattcgatgcaatttccataatttctcgctcaatattttgtagggcttattatttttttccgagccgcatcaaggcgatatgcggtctacgtttttgcaggcgagttattagaataaagaaatgatacgcgcgaggtcagagaaaatcttcacaatcaagactttgaaataacggagatggataagaattttctactaaattaatcgcaggagaatattcattctctatttgcggcagatcacaaaaaaaaggtgcacatttgtgcacccaaggatgaaagctgacagcaatgtcagccgcagaccactttaatggccagtcctccgcgacttgtttcgcggtatttatcgttcatatctttgccggtttcatacatcgtctcgatcactttatcgagactaacacgcggtgcgctggtgcggcgcatcgccatccgcgcggcgtttactgctttcacggcattaatggcattacgttcaatgcacgggatttgtacctgtccggcaaccggatcgcaggtcagcccaaggttatgctccatcgcgatttccgccgcattgcatacctgcgccggactgccgcccagtagttcagttaaccctgccgccgccatactacaggccacgccaatctccccctgacagccgacttccgcgccagagatggaggcgttcattttatacagcgcgccaatagcccccgcggccagaaaatagcgggcaatactccgctcgtttaccggacgacggaacttatcgtaataagccagtactgccggaataatgccgcacgcaccgttagtcggtgccgttaccacgcgcccgccagctgcgttttcttcactaaccgccagcgcgtacatgttgatccagtcgatgacattcatcggatcgttagagatgttatcgctggaaaccagctgacgacgcagcgctacggcacggcgcggcacattgagcggaccaggcagcacgccttcagtgttcatcccacgttcaataccgtcatgcatcacttgccagatacgggcaaaaccggcgtcaatttccgctttgctgcgcagcgctagctcgttgtgcatcatcagaccagatatagacaggccgttgtaatcacacattttcagcagttcacctgcactgtggaaatcgtaaggtacggacgtttcgacatcgtggctcaggccgaagtgttcttcttcgacaataaacccgccgccgacagagtaataggttttacttaatagctcttcctgtcccttccaggcagtgatccgcattccgttctcatggcgaggcaacatttcgggatggaagataatgttctttgctacaggaaaatcaacaatatgcgcaccagatgccactggcagccgcccgctgcgcgttactaactctataaatgcagggatctcatcaatgacaacatcctgcggactgtttcctgccagtcccatgatgatggcgacatccgtggcatggcctttgcccgtcagactcaagctcccgtacagatcgaccacaatatggctcgtcgcggttaataagccgctactttccagccgatcaataaaactttttccggcattcattggccccacggtatggctactggagggaccaatcccaattttgaaaatatcgaatgcactaatcatatccacaccctcggattgccgttcagtgaagtggagcggaacgaccttacgaccgtcccgctcacgaggctttacgcactacgtactgcgatggcttcaatttccagcttcacatctttcggcaaacgcgcgacctgcacacagctccgggtcggataggtcgcctgatgctcatcgaagaactgcttatagacttcgttgatggtggcaaaatcattcagatcggtgataaacacggtcatcttgatgatatcgcccacgctcagcccggcagcaaccacgatcgctttgacgttttcgaggcttaaacgcgcctgatcttgcacatcagccgggatctcaccggtctgtgggcaaaccggtatttgcccggaggtgaagaccatgctgcctaaatcaacgccctgaacataagggccgattgcgcctggggcacgttgcgtttcgataatctttttcatacatcctccggcgtcagagcgcctgggtaaaggtacgactaataacatcctgttgctgttcacgggtcagtgcgttgaagcgcacggcgtagccagagacacggattgtcaggttaggatatttttccgggtgctcgatggcatccagcagcatttcccgattcattacgttgacgttgaggtgttgaccgccttcgacatccgcttcgtggtggaaatacccatccagcaggccgacaaggttggttttacgtactggatcttctttgcccagcgccgcaggaacgatactgaaggtgtagctgatcccatctttggcgtaggtgaacggcagtttcgccacgctcgtcaaactggccacggcacctttgcggtcacgaccatgcatcgggttagcgcccggcgcgaacggtgttccggcgcgacgaccgtccggcgtattaccggttttctggccgtacaccacgttagaagtgatagtcagaatgctctgggtagggacggcgttgcgataggttggcagcgctttaattttcttcataaagcgttcaaccaggtcgcaggcaatgctgtctacgcgctcgtcgttgttgccgtactgcggatattcaccgtcgatttcaaagtccaccgccaggccgttttcgtcacggattggtttcacgcgggcatatttgatggcagacagggagtccgtcgccacgctcaggcccgcgatgccgcatgccatagtgcgatagacatcacgatcgtgcagcgccatcaggctagcttcgtagctgtacttgtcgtgcatgtagtgaatgatattcagcgcgctgatgtactgcaccgccagccagtccatgaagtgatcgaggctgtccatcactttgtcgtaatccagcacgtcgtccatcagcggtgctgttttcggcccgacctgaatcttcagcttctcgtccaccccgccgttaattgcgtagagcagcgttttcgccaggttagcgcgtgcaccaaagaactgcatttgcttaccaatcaccattgggctgacgcagcaggcaatcgcgtaatcgtcgctgttgaagtcagtacgcatcagatcgtcattttcatactgcaaggaagaggtgacgatgctcacctgcgcggcatattttttgaaggcaatcggtaattcttcgctccaaagaatggtcaggttaggttccggtgccggccccatagtgtgcagggtgtgcaaatagcggaaggagtttttggtcaccagcgtacgaccgtccagccccatcccgccgatcacttccgtcgcccagattgggtcgccggagaacaggctatcaaattccggtgtacgcaggaagcgtaccatacggatcttcatgatgaagtgatcgatcagttcctgtgcctgctgctcattgagtacgccagctttaaagtcgcgctcaatgtagatatcgaggaagcttgccgtgcggcccaggctcatcgcgccgccattttggcttttcactgccgccagataagcgaagtagagccactgcaccgcttcctgcgcattctgcgccgggcgagagatatcaaagccatatttcgccgccatttcctgaatctgcaacagcgcatgacgatgctctgccagctcctcacgcagacggatggtggcttccagatcctcgcctttttccagacgagactggagatcggcaaattgcagttcgcgttcacgtaccagataactgatgccatacagcgctacgcggcgatagtcaccgataatgcgcccacggccatagccatctggtaaaccggtcagcacgccagatttacggcagcgcagcatatccggactgtaaacatcaaatacgccctggttatgggttttacgcagatcggtaaacagatattcaaattcactgtccatttctcggccataggcgtggaaactacttttaatcatattaatgccaccgaacgggtgtagcgcacgtttcaacggcgcatccgtttgcaggccaacaattttttccagcggctggttaatatatcccgcatcatgagcggtaattgtggtggcaatattggtatcgaaatcaaccggcgcgtgggttgcattttcgatacggatgccttccattactttttcccacaattccgtggtggcaggcgtcgcttcggcgaggaaagattcatcgccttcatacggtgtatagttatgttgaataaaatcgcggacattaatttcgtttttccagtccgtacctttaaagccaagccatgcgtcggcgtacagcttatcgctggtatcaatatctaccttcatgaaaaataatctctctacaatacttcaactaaattatgcaaattctgcgggcgcgttaactttgcctaaatgaatggcatccaaagcaatcattttttcttcgttagtcggaataacggcacaaatgacacgcgcattttcactggaaacaattcgctcaccacaggagttagagcgattattcatttctgtatcaatctctaagcctaatacagccaaatgttccatgaccagacgacgaattaagctactattctctcctattccgccggtgaatataattccatccaggcgacgtaaactagctgcgtgtccggcaatatgacgggcaattcggtgaacaaaggttttaattgccagttgcgcgcgttcgtgaccttcatgccaggctttttccagaacacgtaaatcgctagaaagaccggaaatacctaataatccgctctctttattcactacgcgttccaggtcacccaggctctggttggtttggctggcgacccaggacatcgcaccaaagtcgacatcgccactgcgggtacccatcatcaagccttccagcggcgtcattcccatactggtatcaacactctgaccgttgcgaaccgcgcagatactcgcgccattgccaagatgcgccacaaccaggccggagtcatcttccgccagattcagcaggctatgtgcgcgctgggaaacatagcggtggctcgtgccgtggaaaccataacggcgtacacctaactcttcataatatttccacggcaggccgtataaataagcttccggagccatcgtctggtggaaactggtatcaaataccgccacctgagttacgcccggaaataattgctgcgcgctttcaataccacttaaattggcgtaattatgcaggggtgccagtggagaaacgcgacggatattatcaatgacttcatcggtaataatggcggactcggtaaaaatactgccgccgtgagcgatgcggtggccaattaaggccacactgtcatttaaattccgtttttccagttcaaatgcaattgccttcaatgcaccttcgtagctgtggtgagccagcggtgctggctctcccccatttacggataagaatgcattttcgctgttaataccgtcggcaataccactcattaatacttcacagtcgctggcatcgagcacggaaaacttaatgctagagctaccacagttaataaccaaaacaaccggaaattcattcatctcttttctcatcctgagttacggattaaaacagtttgtatacgatgttcaggatggtcagcagaccaatcacggtaacaaacacgttatccagacgaccacggtatttcgccagagacggcgctttacggatggcatacatcggcaacaggcacagcagggatgcgataatcggtgcgcccatggcttcaatcaggtcaaggatgttcgggttggcgtaggcaacaacccaggtggagcccatgatgaagatcatgctgatagtgttcagtttacccaggctcactttagttttgtcgcctttataaccaaacttcaggaccaggccattcagaccttccagcgttcccagatagtgaccgaagaaagatttgaagatagccacgagtgcgatgatggaagccgcatattccagtgtaatcgcgaacgttgttttggtaccggtcatggacgcaaagtggttagccagataagaaagcactggaatattctgcgctttggcttccgccatgttggccggagacagagtaaacaggcagctaaaggcaaagaacatcaccactgcaaccatcagcatgctggcacgagaaatgatttgggaacatttacgttcggtgaagtcgcgaccgaagtctttctcatactcttcacgcttagaaaccacgaaggaagagacgattgggctgaagttaaaggagaaaaccatgatggaaatccccagccagacagtgatcaggataccgtcatgaccggttaagctcaggctaccgaggtcaacctggtcgataactgcagagttccagtaagggatcaggctcaaagaaatcagcaccaggctggcgataaacggccataccaggtagctcatcactttaaccatcagatccttaccaaaccagatgacgaaagccatcagcagcaacaggaacagcgccacaaagccgcgattcagcggtgcaaagccgagctggttttcccagaacgtcataaaggtattggtaatagtaacgccataaatccacagcagtgggcaaatcgcgaagaagtacaggaacgtgataaccacgccgccagttttaccaaaatgctcttccaccgtttccgtaatgttgccggaagggttagagccagaaagacacagacgcgccagcgcccggtggcaataaaacgcgatggggtatgccaataccaacatcagaagaatcgggatcagtccgccaaaacctgcgcggatagggaagaacagcaccccggcgccgattgccgtaccaaacaagcctaacgtccatgtggtatcacttttacgccaggagctttgttttgtctggctggatacaatgctatcactagtactcatatcctatcctcaacgaattaattaagcgtcaacgaaaccggtgatttgagagacgcgagaaagatcgatattgccgccggaaataatactgacggtttttctgttttgaatatattggtctaatttaccgcttaataatgcagcacatgccagagcgcctgcgccttcggtgacgactttattgcgctgaattaaggcaatcatactgtttctgatttcgtcttcgctgaccagcacgatgtcatcgactaattcacgaacgatttcgtaagttaaattacccgggcgggagacatcacaaccatccgccagggtgccggtagttcggtgcgtggttatttctccggagtggaaagaagccgccatgccgtgaacgttttcagactgtacgccaataacacgaatggtcgggttaatagatttaattgccaccgcaataccagcaattaaaccgccaccaccaattggcacaatcacgttatcgacatcatagagatcttccataatttccagaccaatcgttccctggccagcaatcactttcggatcatcgtaaggtgggataaaaatacggccttccatttcgacaatttcgctcactttagcgatagtgtcgttgaagttatcaccatgcagaacgacttctgcggagtagtcgcacgttgccgctactttggattttggcgcaccttttggcatcaccactttaccgtcgatacccagcatcgcgcaggagagggaaaccccttgcgcatggttgcccgcagaacaggccaccacgcctttgcgtttttccgcatcggtcagactacttaatttattaaatgcgccacgaattttaaaactacccgtacgctgcatattttcaaacttcaggaatatttcacctttgcaacgttcactaaaatagttggagcgaggcatgcctgttttataaattcgcccagccagtcgttgtttcgcttcaataatgtcatcaatagcaaccggcagatcgtatgtaatatgcattataaaacctcttcgcctgaattaaatatgtaggtaaccgtaaccgacacctgcaagacagacaggtggattatttatgtttaaataaaaacaaataattaaccaacttctattaattgccttcgtctacacccattataagaactatactctttggctaattccaccaaaacgcttgctgcttttttaatacgataatttttgctccataccgcggcatattgtgccacaggtaatgtttcttcaaccggaatagtaataaattgattagaaccaaaaggactcgtcatatcacaaggaattacagttaagaaatcagcattgagaacaagattataaattgtcacgacactgtcggttttaacgatgttttcaatactgatgccatttctttgtaacgtagtaagcagttcgctgtagtaccccatattagtttgtggcaacacccactgttcgttcttcaagctctccagcgtggtggtgccggtgcatgttcgggacttactggctaccagcacaaactcggactcgaacagcggctcaacatgtaaatcctgaagcttcatttctgcacttaacgtaccaatcgcaaaatccagtcgaccgtcgcggattgccggtaagaagctagacagttgcgcttcatacatagaaacctgcgctttcgggaacacctctttgaacttgttgatcatcccactcataaaagtaaaaccaatcaaactaggaaaaccaaaactgacttccaccaccgcctcagaagacataccgcttatctcattaaccatatttttcatttcacgggtaatggattcggaacgggagagtaacaattgaccggcaggtgttaatgttacaccggtatttttccgcaccactaattccacaccaaaataatcttcaatatcgttaatgattttactgacggccggttgagttaaccctaattcttttgcagcgctgccgatagaaccacttctaatgacttcctgaaagactaccaggtgctgcgttttcggaagaagaatagtgctcataacgacctacgttaattacctcattgacggcatgaagtgtatcaaaatgaaatgaacaggatatgtgcgaccactcacaaattaactttcaatactttccagagtatcgttattacaattaaatacctttaaatatcaacaagttaaagtataaaaatcagcataaaccctgatttttgtcaaaaaaaatgacggggataaccatattttatggcgataacatcattcgttatgtggttaatacaaaaaaggggctgagaccatatttcaagcaattaccggataattaccaggcaaaatttgagttaaatttaatgagcaagttcagtaattttattataaataaaccatttagtgtgataaataatgcggcatgtcacatttttagtcgctatttgttggagaacaaacatttattttatcaatattttaaaattagcaatacatgtattgatcatctcgaacaattgattaacgtcaactttttctcttctgacaggacgagtttttgtgaatgcaatcgttttccataaattcttctcccctcataggcgacgaatagcattttgtgttgaggattacaaaacgaataattgctgatcgccgcgataaggtcagacaaagacaacaagggaaattttcacagagcttttgatcggcgtaggccacagaatgttgcttcgtttactgtaacgccgggtaaatgagcgttttttgatagtgcgaaagaaccctgcgaggaaaataagcatctattattgtttgtcatgatgacaaggcaggcatcaatgaaaggcttcccaattgcgcatatttttcaccctagtatcccgccaatgcacgcagtggttaacaatcacaatagaaatattgattattggacggtaaaaagaaagtttgcagaaattgtctccaccaatgacgttaataaaatttacagtataagtaatgaactgcggagagtattatctgcaataactgcattgaatttctatcatggcgatgttccttctgtcatgatccgaatccaaccggaaaatatgagtccattcattatagatatttctacaggagaacatgatgattatatcatacaaacattagatgtaggcacttttgcaccttttggtgaacaatgtacttgcagtgccgtcaataaaaaagagctggaatgtattaaggagacgatttctaagtattgtgcaaaattcacccgaaaagaagccatcttaaccccccttgtgcactttaataaaaccagcattactagtgattgttggcaaattctcttttttagtcccgatcattttaataatgatttttattgattatttataaaggataaaataatgttccctgttagtagtattggtaatgatattagtagtgatttagtccgtcgaaaaatgaatgaccttcctgaaagcccaacaggaaataacctcgaagcactagcaccaggtatagaaaaactaaaacagacctctattgaaatggtcactttacttaacacgttacaacctggtggaaaatgcattatcactggtgattttcaaaaagaattagcgtacttacaaaatgtaattctttataatgtcagctctcttcgtctggattttttaggttataacgcccaaattattcaacgaagcgacaatacttgtgaacttaccattaatgaaccgttaaaaaaccaggaaatatccacaggtaatatcaatattaattgcccattaaaagatatttacaatgaaatcaggaggttaaacgtaatttttagttgtgggactggagatatcgttgatctatcctctctggacttacgtaatgtcgatttagattattatgatttcacagataaacatatggctaatactattttaaatccttttaaattgaatagtacaaattttactaatgccaacatgtttcaggttaattttgttagtagtacacaaaacgccacaatctcctgggattatttactaaaaataacgcctgttttaataagcattagcgatatgtattctgaagaaaaaatcaagtttgtcgaaagttgtttaaatgagcctggagacattaccgaagaacaattaaaaattatgagatttgcaattataaaatctataccaagggcaactcttacagataaattagaaaatgaattaacaaaagaaatatataaaagcagtagcaaaatcatcaattgcttgaacagaattaaattaacagagatgaaagaattcagtagtgaaaaaatatatgattacatcgatataatcattgaagattatgaaaataccaaagaaaatgcttatctggtcgtcccccaaattaattatactatggatttaaacatagaagactctagcagtgaagagttacttagtgataataccctcgagaaagacgaaaattctccggacaatggctttgaggtcggggaatataacacatatgaagcatataacagtgagaagcaatattttaccagagaggactatacgtatgattacgaccttttaaatgcaatataaacttaataacttcttacaaagtctattattaataccgtagatatttattcatcttaccctgtgcaccaaaagcaaaaactcactgacgcgggtttgaaactgatggcaaccgcaaaaatgcctgatgcgctacgcttatcaggcctacgccatctctgcaatatattgaatttgcgtgcttttgtaggcaggataaggcgttcacgccgcatccggcatgaataaagcgcactcaacaatctgaaacccgccggaacggtttattacgtacatcaggtaaaactgaccgataagccgctttcttttgggtatagtgtcgtggacagtcattcatctttctgcccctccaaaagtaaaaacccgccgaagcgggtttttacgtaaaacaggtgaaactgaccgataagccgctttcttttgggtatagtgtcgtggacagtcattcatctttctgcccctccaaaagcaaaaacccgccgaagcgggtttttacgtaaaccaggtgaaactgaccgataagccgctttcttttgggtatagcgtcgtggacagtcattcatctttctgcccctccaaaagcaaaaacccgccgaagcgggtttttacgtaaatcaggtgaaactgaccgataagccgggttctgtcgtggacagtcattcatctaggccagcaatcgctcactggctcaagcagcctacccgggttcagtacgggccgtaccttatgaacccctatttggccttgctccgggtggagtttaccgtgccacggactgttaccagccgcgcggtgcgctcttaccgcaccctttcacccttacctgatcccgcttgcgcgggccatcggcggtttgctctctgttgcactggtcgtgggtttcccccccaggcgttacctggcaccctgccctatggagcccggactttcctcccctccgcccgtctcccccgaagaggacgacgacgaagcggcgactgtctggtcagcttcggcgcgcagtatagagggtttgcgcgcccttgtcaccccgcgttgcgcattccaatcgccagtgtcgcggcgatattacgactagcacggcagatattgtcataagccccgcggaatgcttcgtccaacgtacctatgctggtcaatacgctgaagaccgcatcaatgccatgctgatgtacaacgccaacatcatcggtcaggctacccgcaatgccaatcaccggtttatggtacttcttcgccacgtttgcgacaccaatcggtaccttcccgtgaatactctggctgtcaatacgcccttcaccggtgatcaccagcgtacaatcgtgaatatgttcctccagattcagcgccgtagtgacgatttcaataccacttttcagttccgcaccaagaaacgccattagcgccgcgcccataccacccgcagctcctgcaccggggacatctttcacatcaacatgcagcgcttttttaatgacctcggcatagtgagagaggttattgtccagctcaacaatcatcgcttcactggctcccttttgtgggccaaagatgcggcttgcgccgttatcgcccaccagcggattggtgacatcacaagcgacgcgaatgacgcaatcttttaagcgcggatcgaggccggaaatatcaatatcattcagagtattaagactaccgccgccaaaaccaatttcattgccgttggcgtcgcataatttcgcccccagcgcctgtaccatgcctgcgccgccatcatttgtagcgctgccgccaatgccgataataatgtttgtcgcaccgctctccagcgcctgcaggattaactcgcctgtgccgcgactagtggtcacgagtggatcgcgtttttccgcaggtaccagctccagcccactggccgccgccatttcaataaacgcggttttgccatcgccggagatcccccaactggcattcactttctcgcccagcggccctgtaacccaggcgtgacgttcagccccctgggtggctgcaatcatcgcttccaccgttccttcgccaccgtcggcaaccggaacagaaacgtactgtgcatcaggaaaaatttcccgaaatcctttttctatcgcctgcgcaacctcgctggcagataaactttctttataagagtctggggcgattacgattttcatacctatgcctgttaccacatgacgccggagggcgtttctcttattcggcctggattccaggcccggattgcaatacgccatccgggcacgacgtcattaacgagtaacttcgactttcgccagtttttcgtagtagcacgccagggcgctatgatccgccgttcctaaaccatctgctcgcagtgcctgcatcatctccataaccgcagctgtgagcggcagttgtgcgccgacgccgtgagaagtatccagcgcattcgccagatccttaatatgcagatcaatacggaagcccggcttgaagttgcggtccatcaccatcggcgctttggcatccagcacggtactgcccgccagtccaccgcgaattgcctgataaaccaggtccgggttaacgcccgctttagttgccagcgttaacgcttcactcatcgcggcaatattcagcgccacaatgacctgatttgccagtttggtgacgttacctgcaccgatttccccggtatgcaccacggaacccgccatcgctttcatcaaatcatagtatttgtcgaaaatagccttgtcgccgcccaccatcacactcagcgtaccgtcgatggctttcggttcaccgccgctcaccggagcatccagcatatcaatgcctttcgctttcagcgcttcgctgatttcacggcttgccagcggtgcgatagaactcatatcgatcaataccgtacctggcttcgcgccttcaataatgccattctcacccagcgccacctctttcacatgaggggagtttggcagcatggttatgatgacgtcgcactgttcagcgatcgctttagccgtagacgctgtttctgcacctgcagcaatcacgtcagcaatagcttctgggttacggtcagcaaccaccaggctgtaacctgctttcagaaggtttttactcattggtttacccataatccccaggccaataaaaccaactttcatagtcatatcaatcatctctcttgttgcggtggtggttattttttaaaggtatcagccagtttctgagtggcagagcggaagacgccgagatcgctgccgacagccacaaacgtcgcgccccattccagataacgacgcgcatcggcttcgaccggcgcgaggataccgctgggtttgccgtgcgcgctggcacggttaaaaatgtgctgaattgctttttgtacatccgggtgacttgcattgccgagatggcctaatgccgcggccagatcgctggggccgacgaagatgccgtctacgccttcggtagcggcaatggcatcgacgttatctacgccctgctgactttctatctggaccagaatagtgatgttcttgttgctctgagcgaaataatccgccacggtgccaaacatattggcgcggtgagaaacggagacgccgcgaatgccttccggtgggtaacgggtacttgccaccgccagctctgcttcctcttttgtttctacaaaaggaatcaggaagttatagaaaccgatatccagaagacgcttaataattaccggctcgttggtcggcactcgcactactggcgcgctggcgctgcctttcaaggccattaactgcggaataaacgtggagatatcgtttggcgcatgttcgccatccagcaccagccagtcaaacccagccaaaccaagaacttcagtgctaatcgggttagagagtgcactccagcaaccaatttgtacctgtttcgcagccagtgcggctttgaatttattcgggaaaacatcgttattcatcgcttatacctttgcttatttctgcaattccatacgtttaatgtcgccaactacgaagaggtagcagaccatcgccatcagcgcactacatcccacgaaaaccagtgctgcattgaaggagtgcagttcacttaccaggtagccaatcaccagtggagtgacaatggaggcaacattgccaaagacgttaaagacgccgccgcagaggccaacaatctctttcggcgcggtgtcagaaatcaccggccagcccagcgcaccaaatcctttgccaaagaaagccagcgccatcagcatgaccaccagcgtggtgttgttggtgtagttacataagatgatggtggaagccagcaacattcccagcacaatcggtagcttacgtgccagggtcagggataaaccgcgtttgatcagataatcgctgaagacacctcccagcacgccgcccgcaaaaccacacagtgctggaatgctggcgaccagacccactttcagaatgctcatgcctttttcctgcaccagataaatcgggaaccaggtgaggaagaaccaggtgatggtgttgataaaatattgtccgaaaaatacgcccagcatcatgcggttagagagcaattgcttgatgtaatgcagtttgggtccgcttgctgccgcactgcccggctttttgtggtccatatcgaccaccgcgccattttcagagataaacttcagctcttccgcagacatacgtgggtgatctgtcgggttatgaatcaacttgatccacagcgccgtcagcacaaaaccaatcacccccataacggtaaagacgtgctcccagccccaggcgaaagtcagccagccaagcagcgggctaaagagcgccaggctgaaatattgcgcgctgttaaagatggcggaggcagtaccacgttctttcgtcgggaaccaggcggcgacaattcgggcgttcgccgggaaacttggcgcttcgctgaagccgagcataaagcgcataaagaacatggagatccctgcccaggccagcgggaacatatcaacaaagccttgcaggaaggtgaataggctccagaaaaagaggctgtaggtgtaaacttttttgctgccaaacttatcaagcagccagccgccggggatttgcatcagcaagtaggcccagccaaaagcggagaagatgtaacccatgctaaccgcacttaactgcaactcttttgccacttcggtaccagcaatagacagcgttgcacgatcggcgtagttaacggcggtaacaataaaaataatcagtaatattaaatagcgggtatgcacgcctttctttttttcgtcaacggtgtccagaatcattttatttacctcgggtacttatgctgatttttattattatggggaaggtgttatttatgagtttcatttatgccgtaacgacaatgaactcgggaattagtataagcagcgcgagaataataatcattgtgcaaatgctaatttaattaatactatttaaatattattttgagcatatgcacataaggttgcgcgctaaagcacagatttgcgctttaccttaccgggcggcactgcaatccctgaaatgattgacattgatcacatttctgcgtttaaactcctgacattcttatttcacccaatgaagtcatttatttttaaatgagaccaggtcctcattttaataacccctggctggagaatattgcacaatggccaacatcgaaatcagacaagaaacgccaactgcgttttatataaaagttcacgacacagataatgtggcaattattgttaatgataatggcctgaaagcaggaacgcgttttccggatgggctggaattaattgaacatattccccaggggcataaagtcgcattgctggacattccggctaatggtgaaattattcgttatggcgaagtgattggttacgccgtgcgtgcaatcccacgcggaagctggatcgacgaaagcatggttgtactaccggaagcgccgccgttacacacgctgccactggcaaccaaagtcccggaacccttaccgccgctggaaggatacacctttgagggctatcgcaatgccgatggcagcgtgggcaccaaaaacctgctcggtatcaccaccagcgtccactgtgtggcaggcgtggtggactatgtagtaaaaatcattgaacgcgatctgctaccgaaatacccgaacgtcgatggcgtggtggggctgaatcatttgtacggttgtggcgtggcgattaacgcaccggcggcagttgtacctatccgtaccattcacaatattagcctgaatcctaactttggcggcgaagtaatggtgattggcctgggttgtgaaaagttgcagcctgagcgcctgctgactggaacggatgatgtgcaagctattccagtagaaagcgccagcattgtcagtttgcaggatgaaaagcatgtcggttttcagtccatggtcgaggatattttgcagatcgccgaacgccatctacaaaaactgaatcaacggcagcgagaaacctgcccggctagtgaactggtcgttggtatgcagtgcggtggcagcgatgcgttttctggtgtaacggcaaacccggcggttggctatgcgtctgatctactggtgcgctgcggcgcaacggtgatgtttagtgaagtaacggaagtgcgtgacgcgatccatctgctgacaccacgcgcagtgaacgaagaggtcggcaaacggctgctggaggagatggagtggtacgataactatctcaatatgggaaaaaccgaccgcagcgccaaccctagcccgggcaacaagaaaggcggtctggcaaacgtggtagagaaggcactcggctccattgctaaaagcggtaaaagcgcaattgttgaagtgctgagccccggtcaacgcccgactaaacgcggattaatttacgccgcgacgccagccagcgattttgtctgtggcacgcaacaggtggctagcggtatcacagtgcaagtgtttacgaccggtcgtggtacgccgtacggcctgatggcggtacccgtcattaaaatggcaacccgcaccgagctggcgaaccgctggtttgatttaatggatattaatgcgggcaccatcgctaccggcgaagaaactattgaagaggtgggctggaagttgttccactttattctcgacgtcgccagcgggaagaagaaaaccttcagcgatcaatgggggctgcataaccagctggcggtgtttaacccggcaccggtgacctgatttcttttggaacgtccctcgcaaaacatggccttagtgccatgtttttattgtttaaagcccccacgtccattaataatgcatttgcattaccttagttcaagcttataatttgagcagaaaacaggctgtaaaaggacagtgaatcatgcccgctaatgctcgctctcacgctgtactgaccactgaaagtaaggtcacgatacgcggacaaacaactatccccgcgccagtgcgtgaggccttaaaactgaagccaggccaggacagcattcattacgaaattctgcctggtgggcaagtatttatgtgccgactgggagatgaacaggaggatcatactatgaatgcatttttgcgttttctggatgcagatatccagaacaacccgcaaaaaactcgtccattcaacattcaacaaggaaagaaacttgtcgctggcatggacgtcaacattgatgatgagattggcgacgacgaataatggattttccacaaagggttaatggttgggcgctatatgctcatccctgttttcaggaaacctacgacgctttagttgccgaagtcgagacattaaagggaaaagatcctgaaaattatcagagaaaagccgccacaaagttattggcggtagtccataaagtgattgaggagcatatcacggtcaatccaagtagtccggcattccgtcatggcaagagcttaggctctgggaaaaataaagactggagtcgggtaaaatttggtgctggtcgttatcgtctcttctttcgttatagtgaaaaagagaaagtcatcattctgggatggatgaacgatgaaaacactctgcgcacctacggtaaaaaaacagatgcctataccgtattcagcaaaatgttaaaaagaggacatcctcctgccgactgggaaaccctcacccgagaaacagaagaaacccattgatggtgttcacaatgcccgccgaacgcattcgtgttgaccagcgggcatcctttctcactccccgaccagaatcacttcaaccccagcctttcgcagtccttccaggctatccgcaggaatgccttcatcaacaatgatcatgtcgatacgttgagtatcaatgatcttatgtaaactggaacgattgaacttactggaatcggtgaccacgatgatccgttccgcaacttcgcacatccgacggtttaaacgagcttcatcttcattatgtgtgctgacgccgcgctccagatcgatcgcatctacaccaagaaacagcatatcgaagtggtaattttgcaggctttgctcagcctgatcgccgtaaaaagattggctctgacggcgcaaatgcccgccggtcatcagcagctcaacgccttccgcttccagcaacgcattagccacgttcataccgttggtcatcgcaattacgtcagtgtgcttgcgcatcagacgagcaatctcaaaagtggtggtcccggaatcgaggataacccgatgacctggctgaatcaactcaacggcagctttcgcaacgctgcgtttcatcgcggtgttcagtgcgcttttatcttccacacttggctcgacactcggcgtcgtgctatcgcagatcaacgcgccaccataggcacgcacagcgatcccctgcttttccagaaacgccagatcgttgcggatcgtcacagtagatacgccatacaatgcgctcagatcgttaacctgcacactcccttgctgtcgcagacgctgaatgatctgttctcgtcgctcgctggtgccagtcactcgcttctcaccactagcgtcggtattactcatagtaagtcctttcgtaaaactttcgtttcatttcgttttgcctattaacgcctttctattaagcaaatgcaagcccaccttgcccattgacgcaagctactctcgtttcagtgactttcattatgtttcttttgtgaatcagatcagaaaaccattatctttcgttttatttttatctcaccatgacgcagtatcaactgaaacaaaacgaaagattaatatcgcagtaatctgaactggagaggaaagtgaaacatctgacagaaatggtgagacagcacaaagcgggcaaaacaaatggaatttatgccgtttgttccgcacatccgctggtgctggaagctgcaatccgctacgccagtgcaaaccaaacgccgttactgattgaagcaacctccaatcaggtagaccagttcggcggttataccggaatgacgcccgccgattttcgcggctttgtttgtcagctcgccgacagcttgaatttcccgcaggatgcgttgattctgggtggtgaccatctggggccaaaccgctggcaaaacctgccggccgctcaggcaatggccaatgccgatgatttgattaaaagctacgttgcggcaggattcaaaaaaatccaccttgattgcagcatgtcctgtcaggacgatccgattcccttaactgatgacatcgtggctgaacgcgccgcccgtctggcgaaagtggcggaagaaacctgtcttgaacactttggcgaagccgatctggagtatgtcattggtaccgaagtgccggtacctggcggcgcgcatgaaaccttaagcgagctggcggtcaccacgccggatgccgcccgcgccacgctggaagcccatcgtcacgcctttgaaaagcaaggtttgaatgccatctggccacgcatcattgccctggtggttcaacccggcgtcgaattcgatcacaccaacgttattgattatcagcccgccaaagcgagcgccttaagccagatggtcgaaaactacgaaacgctgattttcgaagcgcactctaccgattatcaaacgccgcaaagcctgcgccagctggtgattgaccactttgccattctgaaagttggcccagcgctgaccttcgccctgcgtgaagctctgttctctctggcggcgattgaagaagaactggtgccagcgaaagcctgttctggtctgcgtcaggtgctggaagacgtgatgctcgaccgcccggaatactggcaaagccactaccacggtgacggcaacgcgcgtcgtctggcgcgtggttatagctacagcgatcgcgtgcgctattactggccggacagccagattgatgacgctttcgctcatctggtacgtaatctggcggatagtccaattccgctgccgctgatcagccagtatctgccgctgcagtacgtgaaagttcgctccggcgagctgcagccaacgccacgggaactcattatcaaccatattcaggacatcctggcgcagtaccacacagcctgtgaaggccaataagcaaaacaaagaggaacacgctatgccaaatattgttttaagccggattgatgaacgcttgattcacggtcaggtcggcgttcaatgggtcggatttgcgggggcaaatctggtgctggtagccaacgatgaggttgccgaagatccggtacaacaaaacctgatggaaatggtactggcagaagggatcgccgtacgtttctggacgctgcaaaaagttatcgacaacattcatcgcgccgccgatcgacagaaaatcctgctggtttgtaaaacacccgccgatttcctgacgctggtgaaaggtggcgttccggtgaatcgcattaacgttggcaatatgcactacgccaatggcaaacaacaaatcgccaaaacggtttctgtggatgcgggcgatatcgcagcatttaacgacctgaaaaccgctggggtggaatgcttcgttcagggcgtcccgacagagcctgctgtggacctctttaaattactttgagggattcatcatggaaatcagcctgttgcaggcatttgcgttgggcattatcgcctttatcgctggcctggatatgtttaacggcctaacccatatgcaccgcccggtggtcctcggcccgttggtcgggctggtacttggcgatctgcataccggaattttaaccggcggtacgctggaactggtgtggatggggctggccccgctggcgggcgcacagccgcctaacgtgattatcggtactatcgtcggcacggcgtttgccattactactggcgtgaaacccgatgtcgcagtaggtgtcgccgtacctttcgctgtcgcagtacagatggggattaccttcctgttcagcgtgatgtccggcgtgatgtctcgctgcgacctggcaacaaacccgcgccgcatttgatgctggtgccgacggcctggtgcattgctataacgggatgacaggtttacatcaccgcgaaccgggaatggttggcgcgggattaacggacaagcgcgcctggctggaactgatagccgatggtcatcatgtgcatccggcggcaatgagcctgtgttgttgctgtgcgaaagagagaatcgtactgatcaccgacgcgatgcaggcagctgggatgccggatggtcgctatacgttatgtggtgaagaagtgcagatgcacggtggcgttgtccgtaccgcgtctggtgggctggcgggcagtacgctgtctgttgatgcggcagtgcgcaatatggtcgagttgacgggcgtaacgcctgcggaagccatccatatggcgagcctgcatccggcgcgaatgctgggtgttgatggtgttctgggaagccttaaaccgggcaaacgcgccagcgtcgttgcgctggatagcgggctacatgtgcaacaaatctggattcagggtcaattagctagcttttgatagtttgctcctttattgggccttcacttcccccgtaaggcctttctttttctttcgttttgatctgtgcagcggtgtcggatgcgacgctaacgcgtcttatccgacctacagttggtgaccgcaaggccggataaagcgtttgcgccgcatccagcaatcccttttgcttcctttatcttttctttcaacgatcacaaatttcgttttatttcttttttctccattgaactttcagtttcttttctatagattttaatcaacgaaagacatcaccaagtgaaatgaaacgaaaggcaagtgaaagcgacaacgcccgacgtcaagttcatcagactaaggattgagttatgccagaaaattacacccctgctgccgccgcaaccggtacatggactgaagaagagatccgccatcagcctcgcgcatggatccgtagtctcaccaacatcgacgcgctacgttccgcgctcaataacttccttgaaccgttactgcgcaaagagaatctgcggatcatcctgaccggagccggaacgagcgcatttatcggtgacatcatcgcgccgtggctcgccagccataccggtaaaaacttcagcgccgtaccgaccaccgatctggtcaccaatccgatggactacctgaacccagctcatccgctgctgttgatctccttcggtcgatccggcaacagcccggaaagcgtcgcagccgtggaactggcaaatcaatttgtaccggaatgctatcacctgccgatcacctgcaacgaagcgggcgctctttaccaaaacgcgatcaacagcgataacgcgtttgccctgctgatgcccgcagaaacgcacgatcgcggctttgcgatgaccagcagcattaccaccatgatggccagctgcctcgcggttttcgcacctgagacgatcaacagccaaaccttccgcgacgtggcggatcgttgccaggcgatcctgaccagtctgggcgatttcagcgaaggtgtgtttggttacgcaccgtggaaacggatcgtttatctcggtagcggtggcttacagggcgcagcacgcgagagcgcgctgaaagtgctggaactgacggcgggtaaactggcggccttttatgattctccaaccggattccgtcatggaccaaaaagcctggtcgatgacgaaacgctggtggtggtatttgtctccagccacccttacacccgtcagtatgatcttgatctgctggctgaacttcgccgtgacaaccaggcaatgcgtgtaatcgccatcgccgcggaaagcagcgacatcgtcgctgccggtccacatatcatcctgccaccgagtcgtcactttatcgacgttgagcaggcattttgcttcctgatgtacgcccagacgtttgcactgatgcagagcctgcacatgggcaatacgccggataccccaagtgccagtggcaccgttaaccgcgtggtgcaaggcgtaatcattcatccgtggcaggcataagaggatcgcattatgagcattatctccactaaatatctgttacaggacgcccaggccaatggctacgcggtgcctgcttttaacattcataacgccgagacgatccaagcgatcctcgaagtgtgcagtgaaatgcgaagcccggtgatcctcgccggaacgccggggacctttaaacacatcgcgctggaagagatctacgccctgtgtagcgcctattccacaacctacaacatgccactggcgctgcatctcgaccaccacgaaagcctggatgatattcgccgtaaagtccacgcaggtgtgcgcagtgcgatgatcgacggcagccacttcccgtttgccgagaacgtgaagctggtgaaaagcgttgttgacttctgccacagtcaagattgcagcgtggaagcagaactgggccgcctgggcggtgttgaagatgacatgagcgttgacgccgaaagtgcattcctgaccgatccacaagaagctaaacgctttgtcgaactgactggcgtcgacagcctggcggtagcgattggtacggcgcacggcttatacagcaaaacgccgaagattgatttccagcggctggcggaaattcgtgaagtggtggatgttcctctggtgctgcatggtgccagcgatgttccggatgaatttgtccgtcgcactattgaacttggcgtcacaaaagtgaacgttgccacagaattaaaaatagccttcgctggcgcggttaaagcctggtttgcggaaaatccgcagggtaacgatcctcgttattatatgcgcgtcggaatggatgcgatgaaagaagttgtcagaaataaaattaatgtctgtggtagtgcgaatcgaattagtgcataatcattagttttttatgatttatcccaatgtacttcccgattaatatcggggagtgccttaatggaaaaggagataactaaaccttaataaatacatcactacaatatcgcaacaataatatatttaaaaaaattatattattcaactttatggtgaggattacacaatgaccagtccaaatattctcttaacccgtattgataaccgtctggttcacggtcaggttggcgtgacctggacatccaccatcggtgcaaatctgctggtagtcgtggatgatgttgtcgctaacgatgatattcaacagaaattaatgggtattaccgcggaaacctacggctttggcattcgtttctttactatcgaaaaaaccattaacgtcatcggcaaagctgcaccacatcagaagatcttcctgatttgccgtacgccacaaacggtacgtaaattggtagaaggtggtattgacctgaaagatgtcaacgtcggcaatatgcatttcagcgaagggaaaaagcaaatcagcagtaaagtttatgtcgatgaccaggatctcacggacttacgttttattaaacaacgtggcgtgaatgttttcattcaggacgtccctggcgatcaaaaagaacaaatccctgactaaatctaaaatcgccttaatattggtttgaggtaataaaaatgcatgaaataaccctacttcagggattatccctggcggcgttagtttttgttctggggattgatttttggctggaagccttatttttattccgcccgataatcgtttgtaccctaactggcgctattctcggtgatattcagactggcttaattaccggtggtctgacagagttggctttcgccggattaacccctgcaggtggtgttcagccgcccaacccgattatggcgggtctgatgaccaccgtcattgcatggtctacgggcgttgatgccaaaacagcaattggtcttggcctgccgtttagtttgttaatgcagtacgtcattctgttcttctattccgctttcagtttatttatgaccaaagccgataaatgcgcgaaagaggcggatacggcagcgttttcccggcttaactggacaacgatgctcatcgtcgctagtgcgtatgcggtgattgctttcctctgtacttacctggcacagggggcgatgcaggcgctggtgaaagcgatgcccgcctggctgacccacggctttgaagtggctggcggtattctgcctgccgttggttttggcttgctgctgcgcgtaatgttcaaagcgcaatatatcccttacctgatcgccggtttcctgtttgtttgctacatccaggtcagcaacctgttgccggttgccgtactgggcgcaggctttgcggtgtatgagtttttcaatgcgaaatcccggcagcaagcgcaaccgcagcccgttgccagtaaaaatgaagaagaggactacagcaatgggatctgaaatcagtaaaaaagatatcacccgtctgggctttcgtagcagcctgctgcaagcgagctttaactacgaaaggatgcaggcgggcggttttacctgggcgatgttgccgatcctgaaaaagatttataaggacgacaaaccgggcttaagcgcggcgatgaaagataacctcgaatttattaatacccacccgaatctggtcggattcctgatggggttattaattagcatggaagaaaaaggagaaaaccgcgacaccattaaaggcctcaaagtggcactgtttggcccaatcgccgggattggcgatgcgattttctggtttactttgttgccgattatggcgggaatttgcagtagttttgccagccagggaaacctgctggggccgattctatttttcgccgtttacctgcttatctttttcctgcgcgtcggctggacccacgtcggttatagtgtcggcgtgaaggcgatcgataaagtgcgagagaacagccagatgattgcccgtagcgcaaccatcctcgggatcacggtaatcggcgggctgatcgctagctatgtgcatattaacgtggtgacaagctttgccatcgacaatacccacagcgttgcgctgcagcaggatttcttcgataaagtcttcccgaacattttaccgatggcctacaccctgctgatgtattacttcctgcgggtgaaaaaagcgcatccggtgctgttaatcggcgtgacttttgtgctctctattgtttgttccgcattcggcattttgtaaatggaacgaggcactgcgtctggtggtgcctctttacttaaggaatttcatcctgtgcaaacccttcagcaagttgaaaactatacggcgttaagtgaacgtgccagcgaatatttattggccgtgatccgtagcaaaccgaatgccgtgatttgcctggcgaccggagccacgccattactgacgtatcattatctggtagaaaaaatccaccagcagcaggttgatgtcagccagctcaccttcgtgaagctcgacgaatgggtggatctgccattaacgatgccaggcacctgcgaaactttcctgcaacagcatatcgtgcagccgctggggctacgtgaagaccagctcatcagctttcgctccgaagagataaatgagacagagtgcgaacgggtaacgaacctgattgcgcgcaaaggcggtctggatttatgcgttctcggattggggaaaaacggtcatcttgggctgaacgaaccgggagaaagcctgcaaccggcctgccatatcagtcaacttgatgccagaacacagcaacatgagatgttaaaaaccgcgggtcgccccgtgactcgtgggatcaccttaggcctgaaggatattctcaatgcccgcgaagttttgttactggtgactggcgaaggaaagcaggatgcgacagatcgttttctcacggctaaagtctctaccgctatcccggctagttttttatggctgcacagtaactttatttgtttaattaacacctaaccagatgaaaaatttgctcaaaatgtttaaattaacttatgtaacagtcacgcattatattaaataacatttgactgggttgaacataacgccgatagcaaaaggagttatgttcaacaatttaattttagatatacatataacttgttctattaataaatcacctcgtattctgactcgccccctggcgcagcaaagtcaggcatttatactcttttgaatacatagaaaattgatatcaatataatgaaaatatcaaatatttgcatataaatataatcttaaagttcagtctatttaatgttcaatgaaatatttctgcctgtataatctttaaagatgttgaacatatattcacattaaatatgattatgtacttgttacaaggataaggttatatatgaataaagttacaaaaacagctattgcgggcttacttgcgcttttcgcaggtaatgccgctgcaaccgatggtgaaatagtttttgatggcgagattttaaaatccgcttgtgaaatcaatgactctgataagaaaattgaagttgctcttggtcactataatgccgaacagtttcgtaatattggcgagcgtagcccaaaaattccattcactattcctttagttaactgcccaatgactgggtgggagcacgataacggcaacgttgaagcgtctttccgtctatggctggaaacgcgagataatggcaccgtccctaacttccctaatctggcaaaagtaggctcttttgctggcatagcggcaacaggtgtgggtatccgtattgacgatgcggaaagcggaaacattatgccactgaatgctatgggcaatgataacacggtttatcagatcccggcggaatccaatggtattgtcaatgttgacctcatcgcttactacgtaagtaccgtagttccaagtgaaatcaccccaggggaagcagacgctatcgttaacgtaacgctggattaccgttaatacgttagggcgttatctgacctgtcagataacgcccttttccttcctctttctcgttgtatcaggttgaaaaataactatgagtaaacgaacattcgcggtgatattaaccttgttgtgtagcttctgtattggccaggcgcttgcaggaggaatcgttttacagcgaacgcgagtgatctatgatgccagccgcaaagaggctgcgttacctgtcgcaaacaaaggcgcagaaacgccttatttactgcaaagttgggtagataatatagatggtaaaagccgtgccccatttattataaccccaccgctatttcgtcttgaggctggcgatgacagtagtctgcgaattattaaaacagctgataacctgcctgaaaataaagagagcctgttctacattaatgttcgtgccattccagcaaagaaaaaaagtgatgatgttaatgctaacgagttgacgctggtatttaaaacacggatcaaaatgttttatcgccccgcacacctgaagggacgggtaaacgatgcgtggaaaagtctggaatttaaacgtagtgaccatagtctcaatatatataacccaactgaatattacgtcgtatttgccggactggcagtcgataaaaccgatctcacaagcaaaattgaatatatcgcgcccggagaacataaacagttaccacttcctgcatctggcggaaagaacgtgaaatgggctgcgatcaatgattatggcggcagttccgggacagaaactcgtccactgcaataaaaaatataaaaacacaggtcatcagggaatgccacaacgacaccaccagggacataaacgcacaccgaaacagttggcgctcatcatcaaacgttgtttgccgatggtgctcactggcagcggcatgctttgcactaccgctaacgccgaagagtattatttcgaccccattatgctggaaaccacaaaaagtggtatgcaaacaaccgatctgagccgttttagtaaaaaatatgcacaactaccaggaacttatcaggttgatatctggctgaataaaaagaaggttagtcagaaaaaaattacatttaccgccaatgcagagcaacttctgcagccacagtttacggtagaacaactacgtgagctgggtattaaggtggatgaaatcccggcgctggctgaaaaagatgacgatagcgtgatcaacagccttgaacaaatcattcccggtacagctgctgaatttgatttcaatcatcagcaacttaatttgagcattccccaaattgcactgtaccgtgatgcaagaggttacgtctccccttctcgttgggacgatggtataccaacgctgtttaccaactacagctttacaggttctgataaccgttaccgccagggcaatcgtagccaacgacagtacctgaatatgcaaaatggtgctaattttggcccctggcgattacgcaactattccacatggacacgcaacgatcagacaagtagctggaataccatcagtagttatttacaacgtgatatcaaggcgttgaagtctcagttgcttctgggagaaagcgccaccagcggcagtattttttccagctacacctttactggcgtgcaactcgcttccgacgataatatgttgccaaacagccagcgcggatttgccccaacggtacgcggtatcgcaaacagtagtgcaatcgtgactatcaggcaaaatggttatgtgatctatcaaagcaacgtgagtgcgggtgcctttgaaattaacgatctctacccctcttccaacagcggcgatttagaagtcacgattgaagaaagtgacggtacacaacgtcgctttatccagccttattctagtttacccatgatgcagcgacctgggcatctaaagtatagcgcgaccgctggacgctatcgcgctgatgcaaacagtgatagcaaggaacccgaatttgctgaagccacggcaatatatggtttgaataatacttttacgctgtatggcggcctgctcggttctgaagattattatgcgctggggatcggtatcggcggcacacttggcgcactgggcgcgttgagcatggatatcaacagagctgacacccaattcgataaccagcactcttttcatggctatcaatggcgtacgcagtacatcaaagatatcccggaaaccaacaccaatatcgctgtcagctactatcgctataccaacgatggctattttagttttaatgaagccaatacccgcaattgggactataacagtcgccaaaaaagtgaaattcaattcaacatcagccagacaatatttgatggggtaagtctgtatgcctccggtagccagcaagactattggggcaataacgataaaaacaggaatatctctgttggggtttccggccagcaatggggagttggttacagcctgaattatcaatacagccgctacactgatcaaaataatgaccgcgcactctctttgaatctcagtattccgttagaacgctggttaccgcgtagccgggtttcctatcagatgaccagccagaaagatcgcccaacccaacatgaaatgcgtcttgatggcagtctgctggatgatggtcgcctgagctatagcctggaacaaagtctggatgacgataacaaccataacagtagcctgaacgccagttaccgtagtccttatggcaccttcagtgccggatacagctacggtaatgacagcagccaatacaattacggcgttaccggcggcgtggttatccatcctcatggcgtgacgctcagccaatatctgggcaacgcttttgcgcttatcgatgctaacggagcatctggcgtgaggatacaaaactatccggggattgctaccgatccttttggctatgcagtggttccttatctcacaacttatcaggaaaaccgtctcagcgtagatactacgcagctgcccgataacgtcgatcttgaacaaacaacacagtttgtggtgcccaacagaggtgcaatggtagcggcgcgtttcaacgccaatatcggttatcgcgtacttgttacagtcagcgatcgcaacggtaaaccgttgccctttggcgctcttgccagcaacgatgatacggggcaacaaagtatcgtcgatgagggcggcatactatatctctctgggataagcagtaaaagtcaaagctggactgtacgctggggaaatcaggcagatcaacaatgtcagtttgctttcagtacaccggatagtgaacctacaacctctgtattacaaggcacagcgcagtgccattaaggataaaaaaatgaaaagagcgcctcttataacaggtcttttgttgatatccacatcctgcgcttatgcctccagtggagggtgtggagccgacagcactagcggtgcgacaaattacagcagtgtggttgatgatgttacggtgaaccagacagataacgtgacaggacgggagtttacctctgcaacgctaagtagcactaactggcaatacgcctgttcctgctctgcgggtaaggcagttaaacttgtctatatggtcagccccgtacttaccaccactggacatcagacaggatattacaaactcaatgacagcctggatattaaaaccacattacaggcaaacgacattccaggactcacaaccgaccaggttgtctctgttaacacccgattcacacagataaaaaacaacacggtatattctgctgcaacccaaacgggtgtttgccagggtgatacgtctcgttatggacccgttaatattggtgcgaacaccacctttaccctgtatgtcaccaagccatttctcggcagcatgaccattccgaaaacggatattgccgtcattaaaggcgcgtgggtcgatggaatgggaagcccgtctacaggtgacttccatgatttagtcaagttaagcattcagggaaatctcaccgccccacagagctgcaaaattaatcagggcgatgttattaaggttaattttggattcatcaatggtcagaagtttaccacccgcaatgccatgccagacggttttactccagtagactttgatatcacttatgactgtggtgatactagtaagattaaaaacagcttgcaaatgcgcatcgacggtacaactggggtagtagaccagtacaacctggtcgccaggcgaagaagtagtgacaatgtgcccgatgtcggtattcgtattgaaaatctcggcggcggagttgcaaatattccttttcagaacggtatccttcccgttgatccttccgggcatggcaccgtcaatatgcgcgcctggccagttaatctggtcggtggtgagctggaaacaggaaaatttcagggcacagccaccattaccgtcatcgtgcggtaaaagaagacgttgcgttttgattaacgcaacgcttcggcactgttacccctgctgctccagcgcatacttatacagcgcatttttcttcacgccgtgaatttctgcggccagcgccgccgcttttttcagcggcagttctgcctgtagcagcgccagcgtgcgcagggcatcggcgggtaagtcttcttcctgtgctttatgaccttcgacaatcagcaccatttcgcctttgcgacggttttcatcttcctttacccacgccagcagctcgccaacgggcgcgccgtgaatggtttcccaggttttggtcagctcacgcgccagaaccacgtagcgggattcgcctaataccgcaacgatatcttccaggctatctaacagacggtgggtagattcataaaaaatcagcgtgcgcggctccgcttcaatggcttttagcgcatcacggcggcctttacttttggcaggtaaaaagccttcgtaacagaaacggtcagagggtaaacccgctgcgcttaacgcagtgatagcagcacacggcccgggtagcggcaccacgcggatccccgcttcacggcaggtacgcaccagatggtagccaggatcgttaattagcggcgttccggcatcggaaaccagcgcaatgttttgcccctcttgcagcttcgccagcagcgtttcagctttttgttgttcgttatggtcgtgcagcgcaaacaaccgggcattaatcccaaaatgttgcagcaataaaccggtgtgacgagtatcctcggcggcaatcagatcaacggcctgtaatacctctaacgcacgctgggtgatatccgccagattgccgattggcgtcggtacaatgtaaagctggccctgagaattatccgcgctttggtgttgtttcattgtgtcgtccgtattgccgatttaatattgagcattgcgtaaaaaaaatatcactggatacattatggtacccagtacattttctcgtttgaaagccgcgcgttgtctgcctgttgttctggcagccctgattttcgccggttgtggcacccatactcccgatcagtccactgcttatatgcagggcacggcgcaggctgattctgccttttatcttcagcagatgcagcaaagctctgatgataccaggatcaactggcaattactcgccattcgtgcactggtgaaagaaggtaaaaccgggcaggcggttgagttgtttaaccaactaccgcaagaactgaacgatgctcagcgtcgcgagaaaacactgctggcggtagagattaaactggcgcagaaagattttgctggcgcgcaaaacttgctggcgaaaatcacacctgccgatttagaacaaaaccagcaagcgcgttactggcaggcaaaaatcgatgccagccaggggcgtccttccattgatttactgcgcgcgttaattgctcaggaaccgctgcttggcgcgaaagaaaaacagcagaatattgatgccacctggcaggcgctctcctccatgactcaggaacaggcgaatacgctggtgatcaacgccgacgaaaatattctgcaaggctggctggatctgcagcgcgtctggtttgataaccgtaacgatcccgacatgatgaaagccgggatcgccgactggcagaaacgttatccgaacaatccgggcgcgaaaatgctgccaacgcagttggttaacgtaaaagcgtttaaaccagccagcaccaacaaaatcgccctgctgttgccactgaatggccaggcagcggtatttggtcgcactattcagcaaggctttgaagcggcgaaaaatatcggcactcagccagtggcagctcaggtagctgccgcacctgccgcagacgtagctgaacaacctcagccgcaaaccgtggatggcgttgccagcccggcacaagccagcgttagcgatctgaccggtgaacagcctgcagcccagccggtgcctgtaagcgccccggcgacaagcaccgcagcggtaagcgcacccgcaaatccatccgcagagctgaaaatctacgataccagtagtcaaccacttagccagatcttaagccaggttcagcaggatggcgcgagtattgtggtcggtccgttgctgaaaaataacgttgaagagttgctgaagagcaacactccgctgaacgtactggcactgaaccagccggagaatatcgaaaatcgcgtcaatatttgttacttcgcgcttagtccggaagacgaagcgcgcgatgcagcgcgtcatattcgtgaccagggtaaacaagcgccgctggtgctgatcccacgcagtagtttgggcgatcgcgtagccaatgcgtttgcgcaagagtggcagaaactgggcggcggcaccgttctgcaacaaaaatttggttccaccagcgaattacgcgcgggtgttaacggcggttctggtattgctttaacgggtagcccgattactctcagagcgacaaccgactccggcatgacgaccaacaatccaacgctgcaaaccacgccaaccgatgaccagttcaccaataatggcggtcgtgtcgatgcggtgtacattgtggcaacgccgggtgaaatcgcttttatcaaaccgatgatcgccatgcgtaacggtagccagagcggtgcaacgctgtacgccagctcccgcagtgcgcaagggaccgctggcccggatttccgactggagatggaaggcttgcagtacagcgaaatcccgatgctggcaggcggtaatctaccgttaatgcagcaggcactcagcgcggtgaataacgattatagtctggctcgcatgtatgcgatgggcgtcgatgcctggagcctggcaaatcatttcagtcaaatgcgccaggttcagggttttgaaatcaacggtaataccggaagcctgacggctaacccggattgcgtgattaacaggaacttaagttggctacagtaccaacaaggtcaggtagtccccgtcagttaaattaagtgattaacaggaacttatcatggctacagtaccaacaaggagtggtagtccccgtcagttaaccaccaaacagaccggcgatgcgtgggaagcacaagcgcgtcgctggctggaaggcaaaggactgcggtttatcgccgctaacgtgaacgagcgtggcggcgagatcgatctgataatgcgtgaaggccggaccaccatttttgtcgaggtacgctatcgccgctctgcgctttatggcggcgcggcagccagtgtgacccgcagcaaacaacacaaattattacagactgcccgcttgtggctcgcgcgtcataatgggagttttgatactgtggattgccggttcgatgtggtagccttcaccgggaatgaggttgagtggattaaggatgcctttaatgaccacagttaattaaggtttaaggattagcgtgcaagaaagaattaaagcttgcttcactgaaagcattcaaactcaaattgcggcggcagaggcgcttccggatgccatctcccgtgcagccatgacgctggttcagtctctgctcaatggcaacaaaatcctctgttgtggtaatggaacttccgctgccaatgcacagcattttgctgccagcatgatcaaccgtttcgaaacggagcggcccagcttacctgccattgcactaaatactgataatgttgtcttaacggcgattgccaacgatcgcttacatgatgaagtgtatgcaaaacaggtgcgggcgctgggtcatgcgggagatgtattgttagccatttccacccgtggcaacagccgcgatattgttaaagcagttgaagccgccgttacgcgtgatatgaccattgtggcattgaccggctatgacggcggcgaacttgcaggtttgttagggccacaggatgtggagatccgcattcctagccatcgtagtgctcgcattcaggaaatgcatatgctgacggtaaattgcctgtgcgatctgatcgataacacgcttttccctcaccaggatgattaaggagaatacatgaaggcattaagcccaatcgcagtccttatttccgcgctgctgttgcaaggttgtgttgccgctgccgtagtgggtaccgctgctgtgggtaccaaagccgcaactgacccacgcagtgtcggcacccaggtggacgatggtaccctggaagtgcgcgtgaacagcgcattgagcaaagacgaacagattaagaaagaagcgcgcattaatgtaacggcctatcagggcaaagtgctgctggttgggcagagtccaaatgctgaacttagcgctcgcgccaaacagattgctatgggcgtagacggtgccaacgaagtgtataacgagattcgtcagggccagccgattggtctgggcgaagcatctaacgatacgtggatcaccaccaaagtgcgtagccagctcttaaccagcgacctggtgaaaagctccaacgtgaaagtgaccaccgaaaacggtgaagtgttcctgatggggctggtgactgaacgtgaagcgaaagcggcggcagatattgccagccgggtgagcggcgtgaagcgggtaactacggcgtttacgtttattaaataacagccccttgtaatgcctgatgcgacgcttgccgcgtcttatcaggcctacaacgatacaaaccgtaggtcagataaggcgtttacgccgcatccgacatgttttccctcaaatcagaacaacagcgccagcccgccgacaatcacaccagacactgccaccatcgcccctgtcagccataaggctttcgccgggaacgctttgcgcagcataatcagactcggcaaactcactgccgggagcgtcatcaacaatgccagcgccggagcggttcccatacctgccagcatcatcgtttgtacaatcggaatttctgctgccgtgggaatgacaaacaagcatcctgctaccgccatcgccaccacccacatcaggctgttatcgacagcaccatcggcatgggggaataaccagacgcgagcggcacccaacaccagtactgcaaggatgtaaaccgggatcgtactccagaaaagcgtccatagcgccctgccccagcggctaaaaaacccgccctgtgcttccggtatgtcaatttcgaccggtgcctgcgtttgcggtgtttcacgcacccatttttgcaccagcgtcgcaatcagcaacaccatcaccagcccggccaccagacgaatcgccgcaaaaccccagccgaggacaaagcccataaacaccagcgtcgccgggtttaacaccggattgcccatccagaatgccagcgcaccgcccatgctcacctgttggcgacgcattcccgccgcgaccggagccgcacagcaggtacacatcatgcccggcaagctaaacagcgttcccagcagcgtgccgcgaaagcggctttgcccaagcgtacgcaacaaccagtcacgcgggatcagcacctgaatcaagctaccgaggatcacccccagcaccgccgctttccataccgcgaggaaatagatcatcgcgtaatccaacgccgcctgccatgggttagcatccgcctgcgcaaggatagatttaccgatactgtgggtttcggcagcagtaaacgctttgccgtagtaaggttcccatttcacataccagagaccggcaatgacaacgagaaagaaaagcgcgggtttccaccactgaatgggcgttgccgcctgagaactagactgaccagtcatagcattccccaggaataagttatgataattgagcgcgtgaatattacgctcactatcaattcttgggaataattattcagctcttttgcgtaattcactagagcttaaaatcgtcacgccttcatgctcaggccgcatgctctctgccagcatgacccgcgccacgtctctcgcatcaatggatttccagttacctggtaacaaacggaacagcggcgcaaaaagcgtttcgttcatccgctgtttgctacgatcgcccagtaacatgctcgggcgagcaatggtcaatttcggccagttctgggcgattaatgcttcttccatctcccctttgacgcggttatagaaaaacgggctgtgggcattggcacccatcgcactgactaccaacatatgctgcgcgcccagtcgccgcccggttaatgcggtatccactaccagcgtgtaatcggcatgaataaacgcctctttgctccccgcttctcgccgcgtggtgccgagacaacaaaacacaatgtcgatgggatcggtgacctgcgccaacgcgtcactcagttgcggatcatggggattaaacaccccgggcatatcgcccaacggacgtcgcgtcggcgcagcaatggcgttaactttcggttcgttaatcaacatccgcagcaggtgaccgcccaccagccccgttgcgcctgtaatcagtacctgactcatcttcgctcctttacagaattgtctgccttgcgctccacggctcatgcaccaggcttaatagaccatgaggtaattatccccgattgtgggaaattcgcctcatccaatgcaacaacgcggaggaagcatgagtaagaaaattgccgttttaatcactgatgaatttgaggatagtgaatttactagtcccgcagacgagttccgtaaagccggacacgaagtgattaccattgaaaaacaagcgggtaaaacggtgaaaggcaaaaaaggagaagccagcgtgaccatcgataaatccatcgatgaagtgacgcctgcggagtttgatgccctgctgctaccgggcggccatagtccggattatctgcgtggggacaaccgttttgtcacctttacccgtgattttgtgaatagtggcaaaccggtgtttgccatctgtcacggcccgcagttgctgatcagcgccgatgtgattcgggggcgcaaactgaccgcagttaaaccgatcattattgatgttaaaaatgcgggcgcggaattttacgatcaggaagtcgtggttgataaagatcagctggttaccagccggacaccggacgatctgccagcgtttaaccgcgaggcgttacgcctgctcggtgcctgattacgcctgctcggtgccactgtcgcgtagccaaatcatttttttaccaaagcccagcgtgttgtcggtgaatttgatttcatcgagccggatttcccacaccggggcgctcagcattctggcaaccggaaagcgacgattgtacgccttgcgcgcgaggtcgctttcctcaccttccagcctgcggatctcacctttaaactgcacaccgcgaattaacgctaccgttttcggctgaccgtttaccgttccggcaaccgcagcctgcggcccactcatctgcgcgtggcgcgttttttcttccgtcaaaatgtagaaggcgactttctgcgcatcaaaaagataaaaggcattagcgcaccagagttccccttcctgctgcacacaccaagtgacaacatgttgttttgccagccaacggctgatggcgatgagtgtttccattgctgttctcttttatactgtgggcctgaccttaacatgcgacgcagacgatgacaccctggtttctttacttgatccgtaccgccgacaataagctttataccgggatcaccacggatgtcgaacgccgctatcagcagcaccaaagcggcaaaggggcgaaagcactgcgcgggaaaggagaactaacgctggtgttttccgcgccagtgggcgatcgtagcctggcgttacgggcggaatatcgcgttaagcaactgaccaaacggcaaaaagagcgtctggtagcggaaggcgcagggtttgcagagctgttaagcagtctgcaaaccccggagattaaaagcgattgaaatgctcgtgatactcaaccaggccggtaacgccattcagcgcgtcatccgctaaacgatgtacctggaaggcgctttcagtgcccggccagcggcaacgcagatcgtgatgcgccgccagttcaaagccgaaacgactgtacagcgccggatcgcccagcgtcaccactgcggcatagccgaactcattaaggctatcgagtccttcatagaccagttggcgtgccagcccctgtccacggtatttttcatcaaccgccaacggtgccatgccgacccattgcaggtcttcgccctgcacatcaaccggactaaatgccacatagccaatgacctgaccttcgtcatctgtcgccaccagccccagcgtcagaaagccatcttcacgcagatcgtgaaccagcttcgcttccgcatcactttcgaaactgcgacgcagcagggcatcaatacccggcgcatcaatgggaatttctactcgaattagcatggttcacctacgcttgtctgtttggtttcaggcgcggttttcattcccgcctcaacaaaatccgccagttgcagcagcatcatgcgtaaggctttcggcatttgctccagttcaatggcgtccatcaggtttttcacatacagccccagctccgtatcgccttcaatcaccagccgacgctggaagaagagcgtatccggatcttgtttacgcgccgcaatcatcagcagatcgctggcgtcggcactaaaactcacatcagcttgcgcgttctggctaacgaccagtttgccattcaccacgctggtaaaccattgcaggtcaatatcacgcacatgaatacttaaccagcggccttcaagaaactccagctcgccatcatccagcgcctggcggaattgccagcttaagacctgctcaagaacctggcgttttagcgcaaatggcgtcagttttaccggtacactcaacagagatggccccaaatgcacaatacgggaacgcagtttatccaacacgagttttactccctgtttcaacaatcatcctattttgccatatcagaaaaataacatagcggtataaatcaacaattccatatgaaattgctgctaccaccaatacaactttaactgccttaaatcaaaaattgtcgcagcaaggttaactaaaatcccagttcgttaacatttttgcgttttgatagcgcaaccttcaggaaaaattatggagctgctctgccctgccggaaatctcccggcgcttaaggcggccatcgaaaacggcgcagatgctgtttatatcgggctaaaagatgataccaatgcccgtcacttcgccggccttaactttaccgagaaaaaattgcaggaagcggtgagttttgtccatcaacatcgccgcaaacttcacatcgcgattaacacttttgcgcatccggacggttacgcccgttggcagcgcgccgtggatatggcggcgcagctgggtgccgacgcgctgatcctcgccgacctcgccatgctggagtacgccgccgagcgttatccgcatattgagcgccacgtaagcgtgcaggctagcgcgaccaatgaagaggcgattaacttttatcatcgccattttgacgttgctcgcgtggtgctgccgcgcgtgttgagcattcatcaggtgaaacaactggcacgggtcacacctgtaccactggaagtctttgctttcggcagcctgtgcattatgagcgaaggtcgttgctatctgagcagctatctgacgggtgagagccccaacaccataggcgcgtgttctccggcccgtttcgtgcgctggcaacaaacgccgcaggggctggaatcccgcctgaacgaagtgctgatcgaccgttatcaggacggcgaaaacgcaggttatccgacgctatgtaaagggcgttatctggtggacggcgagcgctatcacgcgctggaagaaccaaccagtctcaataccctggaactgctgccggagttaatggcggcgaatattgctagcgtgaaaattgaaggccgccagcgtagcccggcgtatgtcagccaggtggcgaaagtctggcgtcaggctatcgaccgttgtaaggccgatccgcaaaactttgtaccgcaaagcgcgtggatggagacgctcgggagcatgtccgaaggcacgcaaaccactcttggcgcatatcaccgtaaatggcagtgagaaaagcaatgaaatattccttagggccagtgctgtggtactggccaaaagagacgctggaagaattttatcagcaggccgccaccagcagcgccgacgtgatttatcttggtgaagcggtatgcagcaagcgtcgggcaaccaaagttggcgactggctggagatggcaaaaagcctcgccgggagtggtaagcagattgtgctctccacgctggcgctggtgcaggcaagttctgaactgggcgaactgaaacgctatgttgagaacggtgagtttctgattgaagccagcgatctcggcgtggtgaatatgtgcgctgaacgcaaactgccgttcgtcgccgggcacgcgctgaactgctacaacgcggtgacactgaaaatattgctcaaacagggcatgatgcgctggtgtatgccagtggagctttcccgcgactggctggtgaatctgcttaatcagtgcgatgagctgggcattcgtaaccagtttgaagtggaagtcctgagctacggtcatctgccgctggcctactccgcccgctgctttaccgcgcgtagcgaagaccgcccgaaagatgagtgtgaaacctgctgcattaagtatccgaacgggcgcaacgtgctgagccaggaaaaccaacaagtgtttgtactcaatggcattcagaccatgagcggctacgtttacaacctcggtaacgagctggcatccatgcagggcctggttgatgtggtccgcctgagtccgcagggtactgacactttcgcgatgctcgacgccttccgcgctaatgaaaatggcgctgcaccactgccgttgacggcgaacagcgactgtaacggctactggcggcggctggcaggactggagctgcaagcctaagtaaatagctcactttgttaacaactttaactactctttaatgcagtattaaagattaatcggtaacaaagtgagctgttatgactgataaaaccattgcgtttagcctactcgatctggcccccattcccgaaggttctagtgcgcgagaagcattctcccactctctcgatctcgcccgtctggctgaaaagcgcggctatcatcgctactggctggcagaacaccacaatatgactggcattgccagtgctgccacgagcgtattgatcggctatctggcggcgaataccaccacgctgcatctggggtctggcggcgtgatgttgcctaaccacagtccgttggtcattgcagaacagttcggcacgcttaatacactctatccggggcgaatcgatttggggctgggtcgtgctccgggtagtgaccaacggacaatgatggcgctacgtcgtcatatgagcggcgatattgataatttcctccgcgatgtggcggagctggtggactggtttgacgcccgcgatcccaatccgcatgtgcgcccggtaccaggctatggcgagaaaatccccgtgtggttgttaggctccagcctttacagcgcgcaactggcggcgcagcttggtctgccgtttgcgtttgccagtcacttcgcgccggatatgctgttccaggcgctgcatctttatcgcagcaacttcaaaccgagtgcacggctggaaaaaccatacgcgatggtgtgcatcaatattatcgccgccgacagcaaccgcgacgctgaatttctgtttaccagtatgcagcaagcctttgtgaagctgcgccgtggcgaaaccgggcaactgccgccgccgattcaaaatatggatcagttctggagtccgtctgagcagtatggcgtgcagcaggcgctgagtatgagcttggtaggtgataaagcgaaagtgcgtcatggcttgcagagcatcctgcgcgaaaccgacgccgatgagattatggtcaacgggcagattttcgaccaccaggcgcggctgcatagctttgagctggcgatggatgttaaggaagagttgttgggataatgtgtcttaacgcgggaagccttatccgagctggcaacgctgtcctacatagacctgataagcgaagcgcatcaggcattgtgtaggcagcagaaatgtcggataaggcaccgctgattactgatacaccggcagtaaattaaagctgcttaaaatatgcaccagtgcgttgccgacgccaaacaccagaatcagcgcaatcatcggcttgccaccccagacgcggaatttcgggctgccaaagcgtttacggcttgcacgggctaacagcgccggaacaattgccgcccagatggtagccgctaaaccagcataaccaatggcgtacaggaatccgttcgggaacaacagcccccccacaactggcggggcaaaggtcagcaatgccgttttcaagcggcccacagcgctgtcgtcgaaaccaaacagatctgccagatagtcaaacaaacccagcgttacgccgaggaagctactcgctaccgcaaagttactgaacacgaccagcagcagatccagactacggctgttcagtacgccgcttaacgcctgtaccagcacatcaatattaccgcccttctctgcaataccgataaactccggacgcgggatgttacccatcgtcgccagcaaccagatggtatacagcgccagcgccatcagcgtaccgtacaccagatatttcacgatggttttcggatctttgccgtaatacttcatcaggcttggcacgttaccgtgataaccaaagcttgccagacagaacggcagggtcatcaacagatacggtgcataagacgcattgctttcggcgacgttgaacaatgtcgcaggctgcacatgccccagcaggctaccaaaggtgaggaagaaggtaatgactttcgcccccagcacaatcgctgtcatgcgactgacggctttagtgctcaaccacaccacaaacgctaccagcaatgcaaaaccaaaacccgccgcccgtgccgggacgtttagactcatctctgcgaaggtgtgatgcagaatgctaccactggcagaaatataggcataggtcaggatatagagcacaaaggcaatggaaatgccgttgaccacgttccagcctttgcccagcaaatctttggtgatggtgtcaaaactgctaccgattctgtaattcaggttagcttccagaatcatcaagccggaatgcagcatacagaaccaggtaaagatcagcgccgccatactccagaaaaaccacgccccggacatgaccactggcagagaaaacatccctgcgccaataatggtgccgccgataatcaccacgccgccaagcaggctcggactcgtttgggtggtggttagtgttgccatgagggcttctctccagtgaaaaatagtgcgactgcgttgttatgcattgcactgtaccagtacacgagtacaaaagacagaaaaaaagccccgatggtaaaaatcggggctgtatatattattttacagattgtgttcgctgttcagcgatgattacgcatcaccaccgaaacgacgacgaccggtagaatcatcacgacgcggagcgcggccttcacgacgttcgccgctaaaacgacgaccatcaccacggccaccttcacggcgttcaccgctgaagttacgaccgccttcacgacgttcgccaccgaaaccacgaccaccgccacgacgctcaccgccagtatgcggctgtgcatcgcccagtaactgcatgttcatcggcttgttgagaatgcgagtgcgcgtaaagtgttgcagcacttcacccggcatacctttcggcagttcgatggtggagtgagaagcaaacagcttgatgttaccaatgtaacggctgctgatgtcgccttcgttagcaatcgcaccaacgatatgacgaacttcaacaccatcatcgcggcccacttcaatgcggtacagctgcatatcgccaacatcacgacgttcacgacgcggacgatcttcacggtcaccacgcgggccacggtcgttacgatcgcgcggaccacggtcatcacggtcacggaattcacgtttcggacgcatcggcgcatctggcggtacgatcagagtacgttcaccctgtgccattttcagcagtgccgcagccagagtttcgagatccagctcttcaccttcagcagtcggctgaattttgctcagcagtgcgcggtattgatccagatcgctgctttccagctgctgctgtactttagcggcgaatttttccagacggcgtttgcctagcagttctgcgttcggcagttctacttccggaatagtcagcttcatagtacgttcaatgttgcgcagcagacgacgctcgcggttctcaacgaacagcagcgcgcggccagcacgacccgcacgaccggtacgaccgatacggtgaacgtaagactcagaatccatcgggatatcgtagttaactaccaggctgatacgctcaacgtccaggccacgggctgcaacgtcggtcgcaatcaggatgtccagacgaccatctttcaggcgttccagtgtctgttcacgcagcgcctggttcatgtcaccgttcagcgcggcgctgttgtagccgttacgctcaagagcttcagccacttccagagtcgcgtttttggtacgaacgaagataatcgccgcatcaaaatcttccgcttccaggaaacgtaccagtgcttcgtttttgcgcataccccagacagtccagtagctctggctgatgtcaggacgggtagtcacgctggactgaatgcgcacttcctgcggctctttcataaagcggcgggtaatgcgacgaatcgcttccggcatggttgcagagaacagagcggtctgatgaccttccgggatctgcgccataatggtttcaacgtcttcgatgaagcccatgcgcagcatttcgtcagcttcatccagaaccagaccgctcagtttagagaggtccagagtgccacgtttcaggtggtccagcagacggcccggagtaccgacaacgatctgcggcccctgacgcagggcgcgtaattgcacgtcataacgctggccgccgtacagagcaaccacatttacgccgcgcatgtgtttagagaaatccgtcattgcttcagcaacctgtaccgccagttcgcgggtcggtgccagcaccagaatctgtggtgctttcagctcaggatcaagattctgcaacagaggtaaagagaatgctgcagtttttccgctccccgtctgggccatacccagaacgtcgcggccattcagcagatgtggaatacactctgcctgaattggagatggtttttcgtaacccagatcgttaagggcttcaaggataggagccttcaggcccagatctgcaaaagtggtttcgaattcagccatgtagtacgtgtgcctcaaaattaatggcggccagtctacataactcatcatgaaattgatcagcaattttcattgaaaagtgtgaaccggctcaaagtaggtgtattaacgaacaacaacgccctcacccgttaaggtgatggcaatcaaaaaagattacgggctgatgtgtacgtcagttattgctggtcgctttctgccaggtcatcttggtcctggcccaggaggcttaattccaacaatgcgtatcggtgctcaacaaagttatgaacgttgttggcaaccgccagtttgaacagtgccgtggcgctgtccaaatcccccagacttaggtagtacttacctaaatagaagttggtttcactgagatgctcagcgaggctggtgttatccgttgcgtccgccttgagcctttccattaacgtttgttcgctaatgttgcccaggtagaactcgacaatgttccatccccactgttccttatcgcttttttcgaagtgctgtttcaacacttctttagcctgcttctcatcgagcttctgctcggcgagataaagccacagactacggaaaggatcattgggatcgtcttgataaaacgccagcagatcatcttgcgctaacttgtcacgaccgccgtaatataatgcgatcccgcgattcaagtgcgcgtagttgtaagttggatcaagctcaagtacagaatcaaacgcttcataggcagcatcaaaattgcctgcctgcgttaaatatatgcctaagtaattgaatacttcaggcatatccggtcggattgccagcgcttggctaaaatcgttacgcgctaatgccctcagaccgagactatcatacaacactccgcgctcatataaaagctgtgcgcgttcgtcatcggttaaagcccgactggcaaggatttgttccatacgtgccagaatcacttcctgctgtaaagtcggttgcaatggtaccgcgaggacttcacttttacgccaggaagtattactgcatcctgcaagcgtaagtgctgtcgcaacgaaacaccagcgcaaaaaaggcttcatttcccactcccgaagaccacggttgaatgaacgtcctgttcccggttgctaacaaggcgtcctgcccggttaaaagccccccgccgcagcggagggcaaatggcaaccttactcgccctgttcagcagccggagcttccggtgctgcagcaggttgagactgctcagtcgcttctttaatgctcagacggatacggccctggcgatcaacttccagaactttcaccggtacttcctgacccatctgcaggtaatcggtcactttctcaacgcgtttgtcagcgatttgagagatgtggaccagaccttctttaccgccgccgatggcaacaaatgcgccaaagtcaacgatacgggtcactttaccagtgtagacgcggcccacttcgatttctgcagtgatctcttcgatacgacgaatagcatgtttcgctttctcgccgtcggtcgctgcaatcttcacagtaccgtcatcttcgatttcgatggtggtgccagtttcttcggtcagagcacggattacagaaccgcctttaccgataacatctttgatcttgtccgggttgatcttgatggtatggatacgcggtgcgaactcagagatatcgccacgcggcgcgttgatcgcctgttccattacgcccaggatatgcagacgcgcacctttagcctggttcagcgcaacctgcatgatctctttggtgataccttcaattttgatatccatctgcagtgcagagataccgtcgcgggaacctgcaactttgaagtccatatcgcccaggtgatcttcgtcgcccaaaatgtcagacagtacaacgtagttgtcgccttctttcaccagacccattgcgatacccgcaacggcagctttgatcggcacacctgcgtccatcagcgccagagacgcgccgcacacggaagccatagaagaggaaccgttggattcagtgatttcagacacaacacgtacggtgtacgggaatttgtccatatccggcatgactgccagcacgccgcgcttcgccagacgaccgtgaccaatttcacgacgcttcggagaaccgaccatgccggtttcgcctacggagtacggagggaagttgtagtggaacaggaaggtatcggtacgttcgcccatcagttcatcaagaacctgcgcgtcacgagcagtacccagcgttgcggtaaccagcgcctgcgtttcaccacgggtgaacagcgcagaaccgtgagtacgcggcagcacgccagtacgcacatccagaccacggatcatatctttttcacgaccgtcgatacgcggttcgcctgccagtacgcggctacgaacaacgtttttctcgatcgcgtgcagaatttcacccagttcgttttcgtccagggtttcgtcttcagcaagcagcgtcgcgatggtttcagatttgatgacatcaacctgcgcataacgctcttgtttgtcggtgatgcggtaagcatcgctcaggcgagcttcagccagtgcagcaacgcgcgcgtttagcgcttcgtttaccggctccggctgccagtcccaacgcggtttaccggcttctttcaccagttcattgatgttctgaataacaacctgctgttgttcatgaccgaacactactgcgcccagcatctggtcttcgctcagcagttgagcttcagattcaaccatcagtacagcggcttcagtaccggcaacaaccagatccagtttgctctctttcagctcgtcctgagtcgggttcagtacgtactggtcattgatgtaacctacgcgggcagcaccaatcgggccattgaacggaataccagacagagacagcgctgcggaagcaccaatcatcgcgacgatatccgggttaacttgcgggttaacagaaaccacggtggcgataacctgaacttcgttgacgaagccttccgggaacagcgggcgaatcgggcggtcaatcagacgcgcgatcagggtttcgccttcgcttgggcggccttcacgacggaagaagctacccgggatacgaccagcagcgtaggtacgctcctgatagttaacggtcagtgggaagaagtcctgacctggtttggcttttttctggccaacaacggtaacgaataccgcggtgtcatccatgctaaccataacagcggcagtagcctgacgagccatcatgccggtttccagagtcacggtgtgttggccgtactggaatttacgaacgatcggattaagcaatgtaatatcctttctctttcttagacagtaccttacggcactggtgttaataccgcttcttctgcgcatcctcgcgactaatgacaaccctaacccagctctatgtgggtaaagcctctcattagccgcgcgaacctctgcaacggaagatcattcatagcaacaatacattagtttccagtgaattgctgccgtcagcttgaaaaaaggggccactcaggcccccttttctgaaactcgcaagaattagcgacgcagacccaggcgctcgatgagctgggtgtaacgtgctacgtctttacgtttcaggtagtcgagcagtttacgacgctgagaaaccatgcgcagcagaccacgacggctgtggtgatcttttttgtgctctgcaaagtggccctgcaggtggttgatctgtgcagtcagcagtgctacctgaacttcggtagaaccggtgtcgtttgcgtcacgaccaaactcagaaacgattttagctgttgcttcagtacttagagacattttaaaactccaaagtatatagaatgaaaggacgccgatctctaattcagcgatcccagtgtacgttacgcaaagtgttaaacaatttacgcgacgttaagcggcagtattctactcgtagcgacctgttatcgcaagacggttaacattacgccgggtattcaaccaccaggcgacgaggcgcaacgcggccttcatcgtcaatttcgcccataccgataaatttgccgttctcaccttccgtgacgcgaaccagtccttccagtggcgcaccagatgtacgaaccgggttaccatttttgaagtaaacagaagacgttaacggaagattcaccaccggatagtcgctagctggactgtccattggcatcagtaatggatcaagtaactccgcggctggaatatcctgctgttcagcttgctcaacaagttcacgcaggtgctccagggtcaccatccgttcaaccggatatttacttaccgccagacggcgcaggtaaataacatgcgcgccacagccgagtttttcacccaggtcatcaatgatggtgcggatataagtgcctttactgcagtgaatttccagctccagctcattgccttcatggcgaataaacagcaattcataaacggtaatcggacgcgcttcacgcggaacttcaatgccctgacgcgcatattcgtacagttttttgccctgatatttcagtgcactatacatgctagggatctgttcgatatcgccacggaaagtatccagtgccgctgccagctgctctgcgctaaaggttaccggacgttcttcaacgatctgtccgtcggcatcagaagtatcggtacgctgtccaagacgcgcaatgacccgatagcgtttgtcggagtccagcagatactgggaaaacttcgtcgcttccccgaggcaaatcggcaacatgccggtcgccagcgggtccagcgcaccggtatgcccggcacggttggcgttatatatacgtttcactttttgcagcgcatcgttgctggacataccctgaggtttatccagcaacaaaacgccgttaatgtcgcgaccgcgacgacgaggacgactcattagtcctccttgctgtcgtccgggttaacacgacgttcttcgtcatgtttgaccacgctggtcaccaggttactcatgcgcatcccttcaaccagagagttgtcgtagaagaaggtcagttccggcacgatacgcaggcgcatcgctttccccagcaggctgcggatgaaaccagaagcttcttgcaacgctttgatgcccgctttaaccgcgtcttcatctttgtcgttgaggaacgtcacatatactttggcatacgccaggtcgcgagacatttcgacaccggaaacggtggtcatcatgcccaggcgaggatctttaatttcacgctgcaggatgagagcgatctctttttgcatttcctgcgctacgcgctgcgggcgaccaaattctttcgccataataaattctcctgacaaaaaaggggctgttagcccctttttaaaattaatttcaggtggaagggctgttcacgttgacctgataagacgcgccagcgtcacatcaggcaatccatgccggatgcagcgtaaacgccttatcccgcatggaaccctaaaaaccttaagcaatggtacgttggatctcgatgatttcgaatacttcgatcacatcgccagtgcggacgtcgttgtagttcttaacgccgataccacattccataccgttacggacttcgttaacgtcatctttgaagcggcgcagggactccagctcgccttcgtggataaccacgttgtcacgcagaacgcggatcgggttgtgacgtttaaccacaccttcggtaaccatacagcctgcgatggcaccaaatttcgggcttttgaacacgtcacgaacttccgccagaccgataatctgctgtttcagttccggagacagcataccgctcatcgccgctttcacttcgtcaatcaggttatagatgacggagtagtaacgcagatccaggctttccgcttcaatcactttacgtgcagaggcatcagcacgtacgttaaagccaaccaggatggcgttggacgccgcagccagggtggcgtcggtttcggtgataccacctacgccagaaccgatgatcttcactttaacttcgtcagtagacagtttcagcaaggagtcggagatcgcttcgacagaaccctgtacgtctgccttcaggacgatattcacttcgtgaacttcgccttcggtcatgttggcgaacatgttctcgagtttagatttctgctgacgcgccagtttaacttcgcggaatttaccctgacgatagagtgcaacttcacgcgctttcttctcgtcacgtacaacggtaacttcatcacccgcagccggtacgccggacaggccgaggatttccaccggaatggacggacccgcttccagcacttcctgacccagttcgttacgcatcgcacgaacacgaccgtattcgaagccacacagaacgatatcgcccttgtgcagagtaccttcacgtaccagaacggtagcaaccggaccacgacctttatcgaggaaggattcgataaccgcaccgctcgccatacctttacgtaccgctttcagctccagaacttccgcctgcagcaggatagcgtccagcagttcatcgataccggtacccgctttcgcagatacgtgtacgaactggctttcaccgccccactcttccggcaggatgccgtactgggagagttcgttcttaacgcgatccggatcagcttctggtttatcgatcttgttcactgcaaccaccaccggtacctgcgccgctttcgcgtgctggattgcttcgatggtctgcggcatcacaccgtcgtcggcagcaacaaccaggactacgatgtccgttgcctgcgcaccacgagcacgcatactagtaaacgcggcgtgccccggggtgtccaggaaggtgatcatgccgttttcagtttcaacgtggtatgcaccaatgtgctgggtaatgccgcccgcttcgccagaggccactttcgtactacgaatgtagtccagcagagaggttttaccgtggtcaacgtgacccatgatggtcacaaccggcgcgcgcggttcagccgcagcacccgtgtcacggtcgctcattaccgcctcttccagctcgttttcacgacgcaggataactttatggcccatctcttcagcaaccagctgtgcggtttcctgatcgataacctggttgatggttgccattgcgcccagtttcatcatcgctttgatgacctgagagcctttaaccgccatcttgttcgccagttcgccaacggtgatagtttcgccgatcacaacgtcacggttaacggcctgagcaggcttctggaagccttgctgcaggctagaacctttacgttttccgcctttaccgccacgtactgctgcgcgtgcttcttcacgatcagctttactttcagcgtgtttgttgcctttcttcggacgcgctgctttcgcgttacgaccacggccacggccgccttcgacttcacgatcgctttcgtcttctgcctggcgagcatgttgagaagtagtgacgtgataatcgctggaatcttcagtcggttccgcgttatcagtccatttgttttcttccgccatacgacgtgcttcttcagcaacgcgacgtgcttcttcttcgagtttacgacgcgcttcttcttcagctttacgcttgagctctgcagcttcctgctcacggcgggctttttcagcctgggcgtttttagtcatatcgtcttgttgattgctcactttgtctttttccgcagcttcacgtttcgcttgttcagcagcttcacgcttagcttgttctgcggcctcacgttcagctttttgttgcgcctcgcgtttagcgctttcttctgcctcacgacgggcttgctcttccgcttcacgctgcgcttgctcttccgctgcaaggcgttcagcctcttgcggatcgcgtttcacaaaggtgcgtttcttgcggacttcgatttgtacgcttttgctttttccaccggtaccaggaatgttaagggtgctgcgtgttttacgttgcagcgtcaatttgtccgggccactatttttctgattcaggtggtcaatcaaagtctgtttctcttgtgcagacacagagtcgtcagcagacttccggatacctgcatcagcaaattgctgtaccaggcgttccacggaggtctgtcgctctgcggccagcgttttaatcgttacatctgtcatgctgttccttcctgctacagtttattacgcttcgtcaccgaaccagcaaatattacgggcagccataatcagtgctccggctttttcgtcggtcaacccttcgatatcagccagatcatcaatgccctgttcggcgagatcttccagcgtacaaacgccacgggcggccagtttgaatgccaaatcacgatctaccccttcaaggttcagcagatcgtcagccggtttgttatcaccgaggctttcttcctgggcctgtgcaatggtggccagtgcatttttagcacgctcgcgcagtgcttcaacggtcggctcatcaaggccttcgatttccaacagctctttcatcggcacataggccaattcttccagcgtgctgaagccttcttctaccagaacagtcgcgaagtcttcgtcgatgtcgagatatttggtgaaggtgtcgatcgctgcgtgcgcttccgcctgatgcttagcctgcaggtcgtcaacggtcatcacgttgagttcccaaccgctcagctggctagccagacgcacgttctgaccgttacggccaatcgcctgcgccaggttaccggcttcaacggcgatatccatggtgtgtttatcttcatccaccacgatagaagcaacgtctgccggtgccattgcgttaatcacgaactgcgccgggttatcatcccacaggacgatatcgatacgctcgccacccagttcagtagacaccgcctgaacacgcgcgccacgcatacctacgcaagcacctaccggatcgatacgtttatcgttggttttcaccgcgattttcgcacgagaacccggatcgcgagccgctgctttaatttcaatcacttcttcgccgatttctggcacttcaatacggaacagttcgatcagcatttccggcttggaacgagtgacgaacagttgcgcgccacgcgcttccgggcgaacggaatagagcacgccacgaacgcggtcgccagggcggaagttttcacgcggcagcatatcttcgcgcaggatcacggcttcagcgttgttgcccagatccagagagatgttgtcgcggtttacttttttcaccacgccggtgatgatttcaccttcgtgttcacggaactgatcaaccaccatcgcacgttcggcttcacgcactttctgcacgataacctgttttgccgtctgggtagtgatacggtcaaaggtaacagactcaatctgatcttcaacgtaatcgcccaggttcaggctttcatcttcataacgtgcggcttcaagggtgatttccttggtcggctgggtgacttcatcaacaactaaccagcgacggaaagtgtcaaaatcaccgcttttgcgatcgatctgtacgcggacgtcgatctcttgttcatattttttctttgttgctgtcgccagcgcgctttccaatgcttcgaaaatcttctcgcgaggtagcgccttttcattggatacggcttcaactacagccaaaatttctttgttcatcgcgggcttttcacctcatccagactattaaaagtggggaaccaggttcgccttctggatattactcagcgcgaacacttcatctttaccttcgacggtaactgtgatcatttcaccgtctaccgctttgataacgccctgccatttacgacggttttgtaccgccatacggagaaccagagtcacctcttctccgacaaaacgggcgtagtgttcagccgtgaacagtgggcgatcgagacccggactggagacttccaggttataagcaacggtgatgggatcttcaacatccagcacagcacttacctggtggctcacatcagcacaatcatcaacattgatgccatcttcactatcaatatagatgcgcagtgtggatgtgcgaccgcgaataaattcgatgccaaccagttcaaaacccagggcctcaactggcgcagtaatcatctctgttaatttttgctctaatgtggacaagcccacccccaagacataaaaaaagggcctaaagcccagttattctgtagtcagataacaaaaaaccccgataaatcggggctttatataactgaaccctataaccgcaactgcggtctggagcactttccagaaggattttttcaaatcccactacgaaggccgaagtcttcacagtatatttgaaaaaggactctaagggaaagtggttgcgggggccggatttgaaccgacgatcttcgggttatgagcccgacgagctaccaggctgctccaccccgcgcctgaaacgtggcaaattctactcgttttgggtaaaaaatgcaaatactgctgggatttggtgtaccgagacgggacgtaaaatctgcaggcattatagtgatccacgccacattttgtcaacgtttattgctaatcatgtgaatgaatatccagttcactttcatttgttgaatacttttgccttctcctgctctcccttaagcgcattattttacaaaaaacacactaaactcttcctgtctccgataaaagatgattaaatgaaaactcatttattttgcataaaaattcagtgagagcggaaatccaggctcatcatcagttaattaagcagggtgttattttatgacgacgattctcaagcatctcccggtaggtcaacgtattggtatcgctttttctggcggtctggacaccagtgccgcactgctgtggatgcgacaaaagggagcggttccttatgcatatactgcaaacctgggccagccagacgaagaggattatgatgcgatccctcgtcgtgccatggaatacggcgcggagaacgcacgtctgatcgactgccgcaaacaactggtggccgaaggtattgccgctattcagtgtggcgcatttcataacaccaccggcggcctgacctatttcaacacgacgccgctgggccgcgccgtgactggtaccatgctggttgctgcgatgaaagaagatggcgtgaatatctggggtgacggtagcacctacaaaggaaacgatatcgaacgtttctatcgttatggtctgctgaccaatgctgaactgcagatttacaaaccgtggcttgatactgactttattgatgaactgggcggccgtcatgagatgtctgaatttatgattgcctgcggtttcgactacaaaatgtctgtcgaaaaagcctactccacagactccaacatgcttggtgcaacgcatgaagcgaaggatctggaatacctcaactccagcgtcaaaatcgtcaacccgattatgggcgtgaaattctgggatgagagcgtgaagatcccggcagaagaagtcacagtacgctttgaacaaggtcatccggtggcgctgaacggtaaaacctttagcgacgacgtagaaatgatgctggaagctaaccgcatcggcggtcgtcacggcctgggcatgagcgaccagattgaaaaccgtatcatcgaagcgaaaagccgtggtatttacgaagctccggggatggcactgctgcacattgcgtatgaacgcctgttgaccggtattcacaacgaagacaccattgagcagtatcacgcgcatggtcgtcagttgggccgtctgctgtaccaggggcgttggtttgactcccaggcgctgatgctgcgtgactctctgcaacgctgggttgccagccagatcactggtgaagttaccctggagctgcgccgtgggaacgattatagtatcctgaataccgtcagtgagaacctgacctacaagccagagcgtctgacgatggaaaaaggcgacagcgtgttcagcccagatgatcgtattggtcaattgaccatgcgtaacctggatatcactgatacccgcgagaaacttttcggttatgccaaaactggcctgctttcctcctctgccgctagtggcgtgccgcaggtggagaatctggaaaacaaaggccagtaattcgacatcaaccctgcccttcaggggtggggttaccttgcttatcctctgtaaactcctttctgagcatcacataatcgaaaacatcatggtttgcatccacaacccgactgtctcctttatagtgtgcaatcacttcctcaagcgtttgcggctgttccggctttgttacccccatccacgcattaataaggtaattattgtaagctgtgctaaagatgttgttttccgttgtgcgatccacgccatccccaagaacggggctataccagataaacatcgggacatgatatgcctgctggctagcctccctgcctccatgaaaatagacgttcttcttcgtagggtcacgttccaggccgtggtcggcaaaatacatgacgctggcgcggcgatcttttaataattcaaaaacctgacctagcaaactatctgtgtaatgaatggagttgtcatagcaggcatcctgatcgtcctgcggttgaaacacggcgctggattgcggataggcgctacaagccggttcatggcttccatttaaatgaagaacaatcagtttcttttgctgcgtattttgctgtaatgcttggcttaaatgcggcaacaacaattcatcaaatcctctgacataaactgtttccatggcgcgcatggcgatactggtaactgctgtaccattctgccgaaaagcggattggctgcttagccagaaagtctgaaatcctgcttgattagccatattaataatgttgtcggggtaattatgaatgtcatgactcaaaacagaatcagcagttaaagaaaggggaacgctcagcgcagtgtaaggtgcgccgcttattgcttgattaaacagtttgatctgttttctttgtgcttcaacttgcggtgtcgtagagcgtgtatatccatacaaagacatattgtcgacacgtacagactcccccacaatcaacacgtaggtatcaatacctgtatccctgacacttaattgaaaatacggcaccgtgtttgcaatactgagtaatctttgatgctctttcgctgctaaagcaaaatagttgagattgaaaaacggcgtataggtagcaaatcggctcgctagtatatatggactgaacgcttttttattttttgcatctttataagcaaattgacaagcggaaaataaactgccgctaatgacaatcagcaataatattcctgtcactttttttgtcggcaaggaaacatcatattttattattactgccaaaaaaagaagggataaaaaagcaaaggcacatagataagggatatacatccccagcattttgacaacttcatccggatcactctggagcacactaatcgcaaatccatcattgaaagttgtaccaaaggtacaccaactatagaggctaatactcatgtctgccgcagtcagtaacacaaatggtgcggcaacaagcaggcgaagcggaagggaacttatacgttttacaaccaggatggtcagaacgaagaacagcaagcgctgaaccatatgcgctccggaagaagcgactaagttcgtaataccaaaaacaataacacaaagatacaacaaccaatgagatttaaaagttctagcaaatttgttgaatactgtcatccagaaatccaagttcacaaccaatataaacaattatcaacaatgtttaattttatatcagacatgtttttcaactctgatccatatcagaacgaaacactgttagttttttctttttaaatgatgcggccattgcgttctcagtaattaaataacattatcaatgcgtctctaaacattacgcagaacgtagccatcagtcgttatactgacaggagcaggatggtttatcgagaagtaaacatatccgtattcgtaccggaactggagttgacacaataaagtgccaattatgtcagtagaagggaaaaatttataactaaggcgtaccggcaccatcgtttcaaggtaccagctacgagtaaagcaactggacgagatacagatacctgacaaccattcctcagaccaggaccaaaacgaaaaaagacgcttttcagcgtctcttttctggaatttggtaccgaggacgggacttgaacccgtaagccctattgggcactaccacctcaaggtagcgtgtctaccaattccaccacctcggcacggatactactttttagttcgggatatcgctggtcggcttagccggagcagctggctgagtttgttcggttttcgccggtgcactcagattttcccattcgctacctttattggttttgttgctattgatgttacccagcaccagactgatgatgaagaataacgttgccagcagcgccgtcatgcgggtcatgaagttaccagaaccactactaccaaacagcgtagcggaagcgcctgctccgaaggaggctcccatatcagcgcctttaccttgctgcagcatgatcagaccaacaaggccaattgccacaataaggaaaactactaaaagagcttcatacataatcaacctgttccttgcggagttgccgcgtaccaatgcttcaaccaataaagcgggagtttttaatcttccccactgaagcgggtgtgaatactaaccaaagcgaatgaccttcgcaagggcaattttatcgcattgtatcaactgcggaaaaaaacagcaaaaccgatgtgttcgctgagaaaaaaggcgacaatcgccgcctttttagccagttatctaacgctttaaacggcttttactgcatcggcgatgcggtgtgcaaattcagtcacctgcgcttcgtcttcgccttccaccatcacgcgaattaacggttcggtgccggatttacgcagcaacacgcgtccacggttgcccagcgcagcttcaacctctgcggtcacggctttaacactctcatgctcaagtggatcgccgctacctgcggtgtaacgtacgttaaccagaatctgcgggaacattttcatgccgctgcaaaggtcgtgcaggctcatatggttacgtgccatcgccgccagcacctgcaagccagcaacgatgccgtcaccggtagtagttttatccagcaggatcacatgaccggaattctctgcaccgatacgccagcctttctcctgcattttttccagtacgtagcggtcacccactttcgcgcgcgcaaatggaattcctaactgtttcagcgccagttcaagccccatgttgctcatcaatgtacccacagcgccaccacgcagctggccctgacgaagaccttcacgcgcgatgatatacatgatctgatcgccatcgactttattgccttcatggtcaaccataatcacgcgatcgccatcgccgtcgaaggcaataccgagatccgctttttcagccagcacacgagcctggagcgcgcgaacgtcggtagcccccacttcggcattgatgtttacaccgtttggctcacaaccgatagcgataacgttcgcccccagttcgcgcagcacgttcggcgcgatgtgataagtcgcaccgtttgcacaatccaccacaatcttcagttcactgaggctaagttcgttcgggaacgtggctttgcaaaactcgatatagcgacccgcggcatcaacgatacggctggctttacccagttctgcgctatcaacgcagctgatctccttttccatttccgcttcgatggcctcttctaccgcatccggcagtttggtgccgtcgatagagaagaatttaatgccattatcgtagaacgggttatggcttgcagatatcacaattccggcctctgcgcggaaggtacgcgtcagataagccacggccggtgttggcatcgggccagtgaagagtgcggaaaggcccgctgccgccagacccgcttccagtgcactctccagcatatagccagaaatacgcgtgtctttaccaataataatcttacgggagccgtggcgcgccagcactttacccgcggcccaacccagcttaagcacaaaatcaggtgtgatcggcgcatcccctacacgaccacgaatcccatcggtaccgaaatatttacgattactcatagcgtttgttttcctttgcagacagagtggcttccaccacccgcatcgcttctacggtttctttgacgtcatgaacacgaatgatgtgcgcgccttgcattgcggcaatgaccgcacaggccagactaccgctcaggcgctcggacggccccacgttcagcagctgcccaatcatgctttttcgactcatacccaccaacagcggcaggttgaaatggtgaaattcagccaggcgcgccagtaaactatagttatgggagagatttttaccgaaaccgaatccggggtcgagcaacaatttctcttttgcgatacccgcctgctcgcaacgtgctatttgctcaataaagtagcgattcacttctgcaaagacatcgtcatacttcggagcttcctgcatggtttttggatttccctgcatatgcatcagacaaaccggtaaaccggtttctgcagccgcctccagagcgccaggttcggaaagggagcggatatcattaataatgtgagcgccaactttcgcactctcacggatgacttctggtttggatgtatcgacactgatccagacttcgaagcgttgagcaattgcctcaaccacaggaataacacgttgcaactcttcttcaacgctaacttccgccgcccctgggcgcgtggactcgccaccaacgtcaatgatcgtcgcgccagcgttgatcatcagattcgcatgtttcaccgcatctatcaggctgttatgcgtgccaccatcgctaaaggaatcaggcgtgacgttgaggatccccattacgtgaggatggctaaggtccagactagtaccctgggcaaagagtttcatgatgttatccctggtatgaattgataagaaaaaaccccggagcacgccccggggttttcggtacaaatacagtcatctgatgcgggaacttacttgtcgcctaactgctcactcatggtgttacccgggttcggcgtacgcggttcatcaaccggacgaggagcctttggactaccattgtcgccagaattgttagaagcgcctggttcttcccagcccgctggcggacgtacatcgcgacgtgccatcaggtcatcaatctgcggtgcgtcgatagtctcatatttcatgagagcatctttcatcgcatgcagaatatccatattgtcggtcagaagctgacgcgcacgattatagttacgctcaatcagtgctttcacttcctggtcgatgatacgtgcagtttcatcggacatatgtttcgctttcgctacgctacggccgaggaacacttcaccttcttcttccgcgtacagcagtggacccaatttctcagagaagccccactgagtcaccatgttacgtgccaggttggtcgcaactttaatatcgttggacgcaccggtagatacatgttccggcccgtagatgatctcttctgccagacgaccaccgtacagcgtagaaatctggctttccagtttctgacggctggcgctgattgcgtcgccctcaggcaagaagaaagtcacacccagcgcacgaccgcgtgggataatcgtcactttgtgcaccggatcgtgttccggcaccaggcgaccgataatcgcatgacccgcttcgtggtaagccgtgctttctttctgcgcttccgtcatcaccatggagcgacgttccgcacccatcatgattttgtctttcgctttctcgaactcaaccatgctcacaacgcgtttgttgccacgagcagcgaacagtgccgcttcgttcaccaggttcgccaggtcagcaccggagaaaccaggagtaccacgggcaatgattgccgcgtcgatatcgggtgccaatggtacgcgacgcatgtgaactttcaggatctgctcacgaccgcgaacatctggcaagccgaccacaacctgacggtcgaaacggccaggacgcagcagggccgggtcgagaacgtccggacggttagtcgcggcgataacgatgataccttcgttaccttcgaagccatccatctcaaccagcatctggttcagagtctgttcacgttcatcgtgaccaccgcccagaccagcgccacgctggcggcctacggcgtcgatttcatcgataaagatgatgcacggtgccgctttcttcgcctgttcgaacatgtcacgaacacgggatgcacccacaccgacgaacatttctacgaagtcagaaccggagatagtaaagaacggaactttcgcttcgcctgcaatcgctttcgccagcagcgttttaccggtacccggaggaccgaccatcaagacgcctttcgggatcttaccgccgagtttctggaagcggctcggctcgcgcagatactcaaccagttcagcaacttcttcttttgcttcgtcgcagcccgcaacgtcagcaaaggtcgttttgatctgatcttccgtcagcatgcgcgctttgctcttaccaaagctcatggcacctttgccaccgccgccctgcatttgacgcatgaagaagatccagacaccaatcagcaacagcatcgggaaccaggagatgaagatagaagccagcaggcttggttcttcaggcggttcaccgacaaccttgacgttcttggtcaacaggttatccagtaatttcggatcctgaaccggaatgtaagtggtataacggttactatctttcttggtaacgttgatttcacgtccgttgatacgcgcttcacgaacctggtcgttattgacctcttgtaggaaggtagagtaatccaccttacggccattagactcgctgggcccaaagctctggaatacactcatcagcacaacggcaatgaccagccagagtattaggtttttcgccatgtcactcaagggattaacctcttattacaactgtgttaaaaacagcgtcaggatactctatatccagcatctttcaaactttcgtctgaaatctcccggttagggtttacgcccggtcgctacaatatacacttcccggctacgtgcacgagaagagtccagcttacgaactttgaccttcgtaaacagggagcgaatttcccttagatactcatcgaaaccttcgccctggaacaccttcactacaaaactgccacctggcgctaatacatcacgacacatttctagcgccagttccaccagatacatggcacgggggatatccaccgccggtgttccgctcatgtttggtgccatatcggacatgacaacctggactttgctgtcgccaacgcgctccagcagtgctttcatcaccagttcatcacgaaaatcgccctgaagaaagtccacaccaacgataggatccataggtaaaagatcgcaagcgatgatgcggcctttgccgccaatttgggtgaccacatattgactccaaccacccggagcagcaccaaggtcgacaaccgtcattcccggtttaaagagtttgtcactttgctgtatttcatcaagtttaaaccaggcacgggaacgtaacccctttttctgtgcctgttgaacatatttatcgctaaagtgttcctgaagccagcggctggagctggcagaacgcttcttacctgtcatttaactttcccatggggataactcatcgtaaccaattgcgtaaatttttacgcgcctatttggtgatatatgggagatggcggtagaatgacccgttttcaatcccaacgtaagcaaaaaatacgatgaatctgagtactaaacaaaaacagcacctgaaaggtctggcacatccgctcaagccagttgttctgcttggcagtaatggtttgaccgaaggggtgctggccgagattgaacaagcgttagagcaccatgaactcatcaaggtgaaaatcgccaccgaagatcgcgaaactaaaaccttgatcgtggaagctatcgtgcgcgaaaccggcgcctgtaatgtacaggtcatcggtaaaacgctggtgctttatcgcccaactaaagaacgtaaaatcagcctgccacgctaagattatcctaaagttacacacatttgctgtgtaaaacgaggggttttccgcaggcaggagagcaaaatgccacgctctgttcgttgataaaaggccgcatagcggcctttttcctttctttacaatacatcaacatcttgagtattgggtaattcttacaggtattccaccttaattacttcaaattctacttcgccgcccggcgttttgatgaccacaacatcatcttcttctttgccgatcaggccacgagcaatagggctgtttacagaaatcaggttttgtttaaagtcagcttcgtcatcgccaacgatgcgataagtctgttcttcgtcagaatccagattcagcaccgttacggtagcaccaaaaataacgcgcccattgttgggcattttggtgacatcaatcacctgcgcgttgctcagcttggcttcgatgtctttaatacggccttcgcagaaaccctgctgttcacgagctgcgtggtattcggcgttttctttcaggtcgccatgctcacgcgcttccgcgatagcagcaatgatttcaggacggcgcacagatttcagaaaatccagctcttcgcgtaatttttcagcgccgcgtaaggtcatcggaatagcttgcatttgttatacctcttgaatattcctgatagggcaagtcttcacccaccccggctgttcggcctgcccggcataactccttaccgggaccagaagcaaaaaaataccgacccgggtacaagtcccaggtcagctacaattcacattttgatagtcattttaccctgaagttcccgaagggtcatcgtttactttatagggcgttgcgccgtagtatgacggctcgattccaggttgttagcgcgagattatgcgattttccagatttatcatcggattgaccagctgtatagcgttcagtgttcaggccgcaaatgttgatgagtacattactcaactccccgctggtgccaaccttgccctgatggtgcaaaaagtcggcgcgagcgcccccgctattgattaccacagtcagcagatggcgctgcctgccagtacccagaaagtgattactgcgctggcggcgttgattcaactcggccccgattttcgttttaccacgacgcttgaaaccaaaggcaatgtggaaaacggcgtacttaagggtgacttagtggcgcgatttggtgccgatccgacgttaaaacgtcaggatattcgcaatatggtcgcgactttgaaaaaatctggcgtcaaccaaatcgatggcaatgtgttgatagatacctccattttcgccagccacgataaagcccccggctggccatggaatgacatgacacaatgctttagcgctccgcctgccgccgccatagttgaccgcaactgtttctccgtcagcctctacagtgccccaaagcctggtgatatggcttttatacgcgtggcatcttattaccccgttacgatgttcagccaggtacgcaccctcccccgtggttctgccgaagcgcaatactgcgaactggatgtggtgccaggcgacctgaaccgctttacgctgacgggatgcctgccacaacgttctgagccgctcccgttggcttttgccgtgcaggatggagccagctatgccggtgcaattctgaaagatgagttaaaacaggcgggtatcacctggagcggaacactgctgcgccagactcaggttaacgaacctggaacggtagttgccagtaaacagagcgccccgctgcacgatctgcttaagattatgctgaaaaagagcgacaacatgatcgccgatacggttttccgcatgataggccatgcgcgcttcaatgtgcctggaacatggcgggccgggagcgacgccgtgcgtcagatcctgcgccagcaagccggtgtcgatattggaaacaccattattgccgatggtagtgggcttagccggcataacctgattgcccccgccaccatgatgcaggtgctgcaatacattgcccaacacgacaatgaacttaactttatctccatgctgccgctggcgggctatgacggctctttgcagtaccgtgcaggtctgcatcaggcgggcgtggatggaaaagtcagtgcgaaaaccggtagcttgcagggggtatataacctggcgggattcattaccacagcgagcgggcaacgaatggcgtttgtgcaatatctttctggctatgcagtagaacctgcggatcagcgtaatcgccgtattccgttagtgcgttttgaaagccgtttgtataaagatatttatcagaacaattaatcaaaaagaaaccccggcacatggccggggcttcagattattgacaaagtgcgctttgtttatgccggatgcggcgtaaacgccttatccggcctacaaaatcgtgcaaattcaacatattgcaattctcttgtaggcctgataagcgtagcgcatcaggctgatttggcgtttatcatcagtgattaacgcttgtaaatgaactcaacgccttcttcgtcgtcttcgtcccagtcgtcatcccagtcttcatcatcctcttcagcaatctcttcaagctgctggcgatgataatcatcccacatgaattcgactttctctggctgtttcgcttcttcagcctgcacgaccgggttttcaatgataaaggtcatcacatcccagcagagatctttcacgcccagtccactcgccgcagagatcagataatatttatcttcccagcccagcgcctcagcgatcgctttcgctttctcttcggcttctaccttatccagcagatcgatcttgttgaacactaaccaacgcggtttcgtcgccagatcctggctgtatttttccagctcgctgataataatacgcgcgttttcaaccggatcggtgccgtcaatcggatcgatatcgatgaggtgcaacaggacgcggcaacgttccaggtgcttcaggaagcgaatgcccagacctgcgccttccgcagcgccttcaatcagtcctggaatatcggcaacaacgaagctcttttcgttgtccattcgtaccacacccagacttggcaccagagtggtaaacggataatccgccactttcggtttagccgcgcttaccgcacgaataaaggtgcttttacccgcgtttggcatccccaacataccgacgtcagccagcagcatcagctccagcagcagctcgcgcttatcgcccggcgtgccgttggttttctgccgcggtgtacggttaacggagcttttgaaacgggtattgcccagaccgtgccagccgcccttagcaaccagcagacgctgaccgtgtttggtcatatcgcccatggtttcaccagtaccctggtcgattacacgcgtacctaccggcactttaatcgtcacgtctttaccgcgcttaccggtacagtcgcggcttgcgccattctgaccgcgctctgcacggaaagatttttcaaaacgataatcgataagcgtgttcaggttctcgtcggcttccatccatacgtcaccaccatcaccgccgtcgccgccatccgggccgcctttcggaatatacttttcgcggcggaagctcacgcaaccattaccgccatcacctgcaacgaccagaatgcttgcttcatcaacaaacttcattttattctccgtaaatcattcgcctgcgcggggttggcttaccaccgttgtatgcttacgtaatccgccccaaatacgatgaccaatggcggaatacatcgcgcccgcaaccacgacaaacgcaccgagataacctaaaaggtttaacatcggtctggcgaagaaatcgggccaggccagacttaaaagatcactaaaaaacagcgtaaacagtggggtgagcgtgatgatcgcgctcacctgcgctgcctgccagcgagccatcgcttccgccagggcgccatatcctaccaaggtattcagtccgcaaaaaattaaacatgcgagctgccagtggctaagctgcgctatcactccaggctttgccagagggaagagcgcaattgtacataaagtgtacagtaaaaacaggatctgcggactggccagccgacgcaataaaaccttttgcgccacgccataactcacccaaaccgtcgccgcaccgaccccaaagataactccccaggtgtaatcggtgagctttgtaaatatctcgaccagactggtgttaaaaaacatcaccaggccgctcaggagcatcaatgcccctacaacctgagtgctgcgcattttctctttgaggataaatacgctggcaaccatcatgccaactgggctgagttgcccaatcacctggctagcggtcggactcaggtattgcaaggaactgctgaacaggatgaagttcccaaacagcccggcggtcgccactgccaacaaaatcaaccagcgtggcttacgaaacacgcgtaatggcggcaacctcttcttcaccgcaagaatggcacccaggccaatactcgccatcaagaaacggtaaaacacgattgtcggaggttccatcacctccagcacctgcttcattgcgattggcaacgccccccagcaaattgctgtggtgagcgccaaaagaatgccaatgcctgcctgctgcttcataccgtattccctgcaaagcgcatttgcggattaacgtcgcaccatgcgcatttttaccggttatcgaatgtaaaaagccccgcaacgtgttgcggggctttcatccgttaccgggacgcgaaaaacttattcagcttcgatgctgataaatttacggtttttcgggcctttaacttcgaatttcactttaccgtctgctttagcaaacagagtgtggtcacgaccgcaacctacgttagcgccagcgtggaatttggtaccacgttgacgaacgatgatgctacccgccagaacggattcgccaccgaaacgcttaacgcccaggcgtttagcttcactatcgcgaccgttacgtgtggagccgccagcctttttatgtgccatttgaaatctctcctcaggtcttaggcgctgatgccagtaattttcacatcagtgaaccactgacgatggccctgctgcttacgatagtgtttacgacgacgaaacttaacgattttaactttctcgccacgaccgtgagcaacaacttcagctttgattacgccgccatcaacgaaaggaacgccgattttgacttcttcaccgtttgcgatcatcagcacttcagcgaactcaacagtttcgccagttgcgatgtccagcttttccaggcgaacggtctgaccttcgcttactcggtgttgtttaccaccactttggaaaaccgcgtacatataaaactccgcttccgcgcacaccttttcaatgattcagagtgcgctataaatattcacaatagggcgcgaatattacgcaaaacgcacgcctttgacaagtgctacagtcaatacacgaagaaaaaaaacacaacttgtacggtaacgtttatctgtgccattttttcagtacaatcaccctatattcctaaccataaaccctaagttgcctttgttcacagtaaggtaatcggggcgaaaagcccggcttttgcgatgaatttagaaaaaatcaatgagttaaccgcgcaagatatggcgggtgttaatgcggcaatccttgagcagcttaattccgacgtccaactgatcaatcagttaggctattacatcgtcagcggcggcggtaaacgtattcgtccgatgattgctgtactggctgcacgagctgttggctatgagggaaatgcgcatgtcaccattgctgccctgatcgagtttatccacacggcgactctgctacacgacgacgttgtggatgaaagtgatatgcgcaggggtaaagctaccgccaacgccgcatttggcaatgccgccagcgtgctggtaggcgattttatttatacccgcgctttccagatgatgaccagcctcggtagcctcaaagtgctggaagtcatgagtgaagccgtaaacgtcatcgcagaaggtgaagttctgcaactgatgaacgttaacgatccggacatcactgaagaaaactacatgcgcgttatctatagcaaaaccgcgcgtctgtttgaggctgccgcgcagtgttccgggattctggctggctgtacgccggaggaggagaaaggcctgcaggattatgggcgctatctcggcactgctttccagttgatcgacgatttactcgattacaatgccgatggcgaacagttaggtaaaaatgtcggcgacgatctgaacgaaggtaaaccgacgctgccgctgctgcatgcgatgcatcatggcacaccagaacaggcacagatgatccgtaccgccatcgaacagggtaacggtcgccatcttctggaaccggttctggaagcaatgaacgcttgtggatctcttgaatggacgcgtcagcgtgccgaggaagaagcagacaaagccatcgcagcgttacaggtgctcccggacaccccttggcgagaagcactcatcggcctcgcgcacatcgctgttcaacgcgatcgttaatcccctcccctcatcccgcgcagcgcgcgggatggttccagtaagttccataaaaacacttattcagctctataacacctgaaaaatagggatgtgcatctttatatattctgaatattcacactctttacaggaactttttagagcaataggccatcaggagtatagtgatgctcgacagaagaagtgttctgaatgaaagcgactaacttaaggagtgaggaaaaatggaaagtaatttcattgactggcatcccgctgacatcattgcgggtttgcgcaagaagggaacgagtatggcggcggaatctcgcagaaatggtttgagttccagtacgctggcgaatgcattaagccgcccatggccgaaaggagagatgattattgcgaaagccctgggaactgacccctgggttatctggccaagtcgctaccatgatccgcagacccatgagtttatcgacagaacgcagttgatgcgtagctacactaaaccgaaaaaatgagtggtctggcggtagccccgcgaacggggctgccagctctcagacgattattcgcctttcacacgctcaatatttgcacctaaagcgcgcagtttgtcttcaatgcgttcgtagccacgatcgatgtgataaatacgatcaaccaccgtcgtcccttccgcaatacagccagccagcaccaggcttgcacttgcacgcagatcggttgccataacctgtgcgccagaaagtttttcaacaccgtgacaaataacggtattgctttcgatttcggcgtgcgcgcccatacggctcagctctggcacatgcataaagcggttttcaaagaccgtttcggtgataaacccggtcccttctgccaccaggttcaacagcgtgaactgggcctgcatatcggtcgggaatgccggatgcggcgcggtacgtacgttaacagccttcggacgtttgccatgcatatccaggctaatccagtcttcgccgacttcgatgtccgctccagcgtcacgcagtttcgccagcacggcgtcgagagtatctggctgcgcgttacggcagataattttgccgcgagaaatcgccgccgccaccaggaaagtaccggtttcgatacgatccggcagaacgcgatagacaccgccgcctaaacgttccacaccttcgatgacgatacgatcggtgccctgaccgctaattttcgcacccagcgtaatcaggaagttcgcggtatcgacgatttccggttcacgcgctgcgttttcaataatcgtggtgccttccgccagggttgcagcacacatgatggtcaccgttgcgccaacgctgactttatccatcacgatatgtgcacctttcaaacgaccatcgacggaagctttaacgtaaccttcttccagtttgatggtcgcgcctaattgttcgaggccagaaatgtgtagatcaaccggacgcgcaccgatcgtacaaccgccaggtagactaacttgcccctgaccaaagcgcgctaccagcggccccagcgcccagatagaagcacgcatggttttaaccagatcgtaaggtgcgcagaatacattaacgtcgcgggcatcaatatgcacagaaccattacgttctactttcgcacccagctggcttagcagcttcatacttgtatcgacgtctttcagtttcgggacgttctggatctctaccggttcttccgccagtagtgcggcaaaaaggataggcagagcagcatttttagcgccggaaattgtgacttcgccctggagcttcgttggcccctgaacacgaaatttatccatttagtttgttctcagttaacaattcatatccgctaccggcgaatcgcccatagctcaaaagccgttcagtttgcgatcgcgcgcccactccgcaggggtatacgctttgatgctcacagcatgaatgcggttatccgcaatatattccatcagcggaccatagaccgtctgctgttttttaacccgactcatgccgtcaaacaactcacccacggcaataacctgaaagtggctgccatcgccggaaacgtggacttcctggagggagagagcgttcatcaacacgctctgaatttcattattttccatgggatcttcaatcatcagttaataaaccagcgaaacatcttagagcaaagttgcgctggcataaataagcaaaaagcctcgctgataaatcagacaaggctcgacttgcaggcaggtttgccggacaggcggttaacgccatatccggcctgaaaaaatttaacgaggcagaacatcagcaggcaaattatacaatttcgccagggtatacactttgtcgtttaccccctgaagcgtcacattgttgccctgctttttcgccagatcgataagatggagcagcagtgccagtccccccgtatccacgcgggagacacggctaagatcgatgcaggtaatccccttcaccgcttcctcacgcatttcccaaagcggtagcaaaacgtcctgatccagctctccggataacgccagcgtgtcacccgtctgcatccagctcagactctcgctcattattttttctcttccagagtgattttctgttgagaaatgcttttcagttgcgcagtcaggccgtcgatacctttggtacgcagcagcgttccccactcgttttgtttggtggtgatcatactgacgccttcagcaatcatgtcgtaagcctgccaattgcccgtctgggagtttttacgccactggaagtccagacgcaccggcggacggccattcgggtcaataatggtaacgcgaataggcacaatggttttatcgcccagcggctgttctggcgcaatctgataggtttgaccgtgatacatcgccagcgcctgaccgtaagcctgcttcaggtactcacggaaagcggcaaagtaggcttcacgttgagcaggggtcgcactcttgtaatactggcccagcaccagcgcaccggcgtatttcacctgtacgtatggcagcagttcctgatcaacaatggtacgcagataatccgggttggcccgaatttgcggttgctcattcttcaggcgatcgaacgttttctgcgccgcctcgtccatcagcttatacggattggtctggtctgccgcggttgccgcactcagaggtgcaatcaccagcaaagcgaccatcattaaacgtttaaacatgcgtcggttctcctgaaattatttcgttgtacccacaggttcagtggtttcattattacctggcgcagcagctggcgcatcgccactattcttattgtcatcgcctttactaccgtaaaggaactgaccaatgagatcttccagcaccatcgcagacttagtgtcctgaattgtatcgccatccttcaggatagcagtccccagttccgggtcttcaaaaccgacgtttaatgccagatattgttcccccagcaggccggaagtacgaatgctcaggctactggtatctggaatgtggttataacgttgttcaatttccagcgttacgcgcggcagataggttttcgggtccagcgtaatatccgccacccgacccacaacaacgccaccaatactgaccggagagcgcgctttcaggccgccaatgttatcgaacgtcgcataaagcgtgtaggtcggttcagtacgtatggacgtcacgttcgccgccttcaggcaaacaaacagcgccgccagcagtgctgctaataaaaagatacccacccaaatttcattttttttcgtttgcatgaactcaattcccaaacatcaatgcggtcagcacaaaatccagccccagaacagccagagagctgtggacaacggtgcgagtggttgcccggctaatcccggcagacgtcgggatggcgtcgtagccgttaaacaagctaatccacgtcaccgtgatggcgaacaccacgctcttaatcagacagttgaccagatccatacgccagtcgacggcattttgcattgcgctccagaagaacccgctatcaatgcctttccaactgacgccgaccagagatccgccccagatccccacggcgacgaaaataaccgtcaacagtggtaaactaataaccccagcccagaaacggggagaaataacccgacgcagcggatccaccgccatcatctccatactggagagttgctctgtagcgcgcatcaggccgatttctgcggttagcgcgctaccagcacgcccggcaaacaacaacgcggcaaccaccggccccagttcacgcagtaggcttaacgccaccagcatacccagactggtttccgcactataagtggtcagaaccagataaccttgcagccccaacaccattccgatgaacacgccagaaaccacaataatcagcatgctcaggacgccgacattatagagctggcgcaccagcagcggcgcatgtttgcgaaattccggtttgccgaccagcgcattgaataacattaacccggcccgcccgaacgttctcagggttttaatccctttatgtccgaggctcgccagcgcatttaacagcatgagtggcttaactccctggtaaaagatcagcgtgataatcgccggcaggatagcggaacggaacaggcccgtcagctatcccgtccagaaactgacgtacgcgcggatcaggattcgcctgcaacgcctgggcactgccatgagcgacaatttttttgtccgccaggatccaggcgtgatccgcaatacttaacacttccggcacatcgtgagaaaccaccacacaagtcacgcccagcgcgctgttcagctcagaaatcagcttcaccagtacgcccatggtgatgggatcttgcccaacaaaaggttcatcaaacatgatgagatccggctccagcgcaatcgcacgcgccagcgctgcacgccgcgccatcccaccggaaagttcagaaggcattagtttagccgctccacgcagccccacggcctccagcttcatcatcaccgtactatgcaacaatggcgcgggaagttgggtatgttcgcgcagtggataggcgacgttgtcaaatacgttcatatcagtgaacaacgccccggactgaaataacatgctcatccgtttgcgcactgtatacaggcggctacgagacatcgccggaatattctcaccatcgaaaaggatctcaccatgatctggtgcgatttgcccgccaatcagacggagtagcgtcgttttaccgatgccgcttggccccatgatcgccgtgatcttccctcgcggcacggtcagggaaatattatcgaagatgcagcgattgccacgcgtaaaactgacatcgcgcatatcgactaaattcgccacagactgctccataattcacccttcgtcttgcgttgattttctaagcatggcgctcaatttaaccttgaacccaacatatttacagaatattacccgccgtggttagcgaaagctggcatttgttttactttttagccgcataaagtcaaaattaagcatccgttacggctttctgaaaatcttcagcggaccggcgagtatacctgaagaaaggacgttagatgcttttagctacggcactgttaattgttggtttacttttggtcgtttacagtgccgaccgcctggtttttgccgcgtctattctttgccgaacctttggcatcccgccgctgatcatcggcatgacggtggtcagtattggtacaagcttaccagaagtcatcgtcagccttgccgcgtctctgcacgaacaacgcgatttagccgttggtacagccctcggcagtaacattatcaatatattgctgatcctcggtctggctgcgctggttcgtccttttaccgtccattctgatgttctacgccgtgaattacccttaatgttgttggtcagcgtggtggccggttccgtactctatgacggacaacttagtcgcagcgatggtatctttctcctctttctggctgtgctatggctgctgttcattgttaaacttgcacgtcaggctgaacgtcaggggactgacagcctgaccagagagcagcttgcagagctgccgcgtgacggcggattgcccgtcgcgtttttatggctcggcattgcgcttatcatcatgccagtggccacgcggatggtggttgataacgccacggtgctggcgaattactttgccatcagcgagttgacgatgggtctgacggcaattgctatcggaaccagcctgccggaactggcaaccgcaatagcgggggttcgcaaaggtgaaaacgacattgctgtcggaaatatcattggcgcaaacatttttaatattgtcatcgtgttgggtttacccgcgctgataacgccaggagagattgatccactggcgtacagtcgtgactacagcgtgatgttgctggtgagcattatttttgcgttgctgtgctggcggcgctccccgcaaccgggccgtggtgtaggggtattattaactggcggatttatcgtatggctggcgatgttgtactggttaagcccaatactcgttgaataactggaaacgcattatgagccacgtagagttacaaccgggttttgactttcagcaagcaggtaaagaagtcctggcgattgaacgtgaatgcctggcggagcttgatcaatacatcaatcagaatttcacgcttgcctgtgaaaagatgttctggtgtaaagggaaagttgtcgtcatggggatgggaaaaagcgggcatattgggcgaaaaatggcggcaacgtttgccagcaccggtacacctagttttttcgtccatcctggtgaagccgcgcatggtgatttaggcatggttaccccacaggatgtggtgattgctatctctaactctggtgaatccagcgaaatcacggccttaattccagtgcttaagcgtcttcacgtaccgttaatctgcatcaccggtcgcccggagagcagcatggcgcgcgccgcagatgtgcatctgtgtgttaaagtagcgaaagaagcctgtccgttagggctggcaccgaccagcagcaccaccgccacgctggttatgggcgatgccctcgctgtcgcgctgttaaaagcacgcggctttactgctgaagattttgcgctcagtcacccaggcggcgcactgggtcgtaaacttctgctgcgcgtaaacgatattatgcatacgggcgatgagatcccgcatgttaagaaaacggccagtctgcgtgacgcgttgctggaagttacccgcaaaaatcttggtatgactgtcatttgcgatgacaatatgatgattgaaggcatctttaccgacggtgatttacgccgtgtcttcgatatgggcgtggatgttcgtcagttaagtattgccgatgtgatgacgccggggggaatacgtgtgcgccctggcattctggccgttgaggcactgaacttaatgcagtcccgccatatcacctccgtgatggttgccgatggcgaccatttactcggtgtgttacatatgcatgatttactgcgtgcaggcgtagtgtaaagattcaaggataaacaacaatgagcaaagcaggtgcgagccttgcgacctgttacggccctgtcagcgccgacgttatagcaaaagcagagaacattcgtctgctgatcctcgatgtcgatggcgtactgagtgatggcctgatttatatgggcaataatggcgaagagctgaaagcgttcaatgttcgtgacggttatggcattcgttgtgcgctcacctctgatattgaagtcgctatcattaccgggcgaaaggctaaactggtagaagatcgttgtgccacattggggatcactcacttgtatcaggggcagagtaacaaactgatcgcctttagcgatctgctggaaaaactggcgattgccccggaaaatgtggcttatgtcggcgatgatctcatcgactggccggtaatggaaaaagtgggtttaagcgtcgccgtggccgatgcgcatccactgttgatcccgcgcgccgattacgtgacgcgcattgctggcggtcgtggcgcagtgcgcgaagtttgcgacttattactcctggcgcagggcaaactggatgaagccaaagggcaaagcatatgagtaaagccagacgttgggttatcattgtgctaagtctggcggttctggtgatgatcggcattaatatggccgaaaaagacgataccgcccaggtggtcgtcaacaacaatgatcccacctataaaagcgagcatacggacacgctcgtctataacccagaaggggcactaagctatcgattgattgctcaacacgttgaatattattccgatcaggccgttagctggtttacgcagccggtacttaccacgtttgataaggataaaatcccgacatggtccgtaaaagcagataaagccaagctgaccaatgaccggatgctctatttatatggacacgttgaagtcaacgcacttgtgccagactctcaacttcgcagaatcacgacggataacgcgcagatcaatctggtgacgcaggatgttacctctgaagacctcgtcacgttatacggaacaacatttaactccagcggtctgaaaatgcgcggcaacttacgcagcaagaacgccgagctgattgaaaaggttagaacatcctatgaaattcaaaacaaacaaactcagccttaatcttgtgcttgccagcagtcttctggccgccagcattccggcatttgccgtaaccggagacactgatcagccgatccacattgaaagcgaccagcaatctcttgatatgcaaggcaacgtggttacctttaccggtaatgtcatcgtcacccagggcaccatcaaaattaatgccgacaaagtggtcgttacccgtccgggcggcgaacaaggtaaagaagtgattgacggctacggtaaaccggcaacgttctaccagatgcaggacaacggtaaacccgttgaaggtcacgcttcccagatgcactacgaactggcaaaagattttgtcgttctgacgggtaatgcttatctgcagcaggtcgatagcaacattaagggcgataagatcacttacctggtgaaagagcagaaaatgcaggctttcagcgacaaaggcaagcgcgtaacaaccgttctggtgccgagccagctgcaggacaaaaacaacaaaggccagaccccggcacagaagaagggtaattaattcgttatggcaacattaactgcaaagaaccttgcaaaagcctataaaggccgtcgcgtggtagaagacgtcagcctgaccgtcaactccggggaaattgtcggtctgctggggccaaacggtgccggtaagaccaccactttctacatggttgtaggcattgtgccgcgcgatgcgggcaacatcattattgatgatgacgatatcagtctgctgcctctgcatgcacgcgcgcgccgcggtatcggctatctgccacaggaagcctccattttccgtcgcctcagcgtttacgataacctgatggcggtactgcaaattcgtgacgacttgtctgctgaacaacgtgaagaccgcgcgaacgagctgatggaagagtttcacattgagcacctgcgtgacagcatggggcagagtctctccgggggtgaacgtcgccgtgtagaaattgcccgcgcactggctgcgaatccgaaatttattctgctcgacgaaccgtttgccggggttgacccgatcagcgttatcgacattaaacgcatcattgagcacctgcgcgacagcggcctgggcgtgctgatcactgaccacaacgtgcgtgaaacactggcggtttgtgaacgcgcttatatcgtcagtcaggggcatttgatcgcccacggcacgcctacagaaatcttacaagacgaacacgttaagcgtgtataccttggggaagacttcagactctgatagggtagaagtttgcgacgttttagcaggagagtacgattctgaacatgaagcaaggtttgcaactcaggcttagccaacaactggcgatgacgccacagctccaacaggcaattcgtctgttgcagttgagcacgctggaacttcagcaggagctacagcaggcgctggagagtaatccgctgcttgagcaaatcgacactcatgaagaaatcgacacccgcgaaacgcaagacagtgaaacgctggacaccgccgacgcgctcgaacaaaaagagatgccggaagagctgccgctcgatgccagttgggacaccatttacaccgctggtacaccatccggcaccagcggtgactacattgacgacgagctgccggtctaccagggcgaaacgacgcagaccttgcaggattacctgatgtggcaggttgagctgacaccgttttccgacactgaccgcgctattgctacctctatcgtcgatgccgttgatgaaaccggttatctgactgtcccgctggaagatattctcgaaagtataggcgatgaagagatcgacatcgacgaagttgaagccgtccttaagcggatccaacggtttgatccggtcggtgtggcggcaaaagatctgcgtgactgtctgctgatccaactctcccaattcgataagaccacgccgtggctggaagaggccagactgatcattagcgatcatctcgatctgttagccaatcacgacttccgcactttaatgcgcgtcacgcgtctgaaagaagatgtgctgaaagaagccgtcaatctgatccagagcctcgatccgcgccccgggcagagcatccagactggcgaacctgagtatgtcattccagatgtgctggtgcgtaagcataacggtcactggacggtagaactcaacagtgacagcattccgcgtctgcaaatcaaccagcactacgccagcatgtgcaataacgcgcgcaacgatggtgacagccagtttatccgcagcaatctgcaggatgccaaatggttgatcaagagtctggaaagccgtaacgatacgctactgcgcgtgagtcgctgtatcgttgaacagcagcaagccttctttgagcaaggtgaagaatatatgaaaccgatggtactggccgatatcgcccaggctgtcgaaatgcatgaaagcacgatatctcgcgtgaccacgcaaaaatacctgcatagtccacgaggcatttttgaactgaagtatttcttttccagtcacgtcaataccgagggcggcggcgaagcttcctccacggcgattcgtgcgctggtgaagaaattaatcgcggcggaaaacccagcgaaaccgttgagcgacagcaagttaacctctttgctgagcgaacaaggtatcatggtggcacgccgcactgttgcgaagtaccgagagtctttatccattccgccgagtaaccagcgtaaacaactcgtttgacccaaccgataaggaagacactatgcagctcaacattaccggaaataacgtcgagatcaccgaggcactgcgcgaatttgttacagccaaatttgccaaacttgagcaatattttgaccgaatcaaccaggtctatgttgttctgaaagtggagaaagtcacccacaccagtgatgcaacactgcatgtaaacggtggtgaaattcatgccagcgcggaaggtcaggacatgtacgctgccattgatggcttaattgataagctggcacgccagttgaccaaacataaagataaactgaaacaacactaattgtccgggcaattagcatgtgcatggcggtctgttgtgcggcacaacgggccatttgtacggttaatgctccgagcctgttccactgtttgagtgggcaggttcttaggtgaaattatgacaaataatgatacaactctacagcttagcagtgttcttaacagggaatgtacgcgaagccgcgtccactgtcagagcaaaaaacgcgccctggaaatcatcagcgagctggcggcgaaacaacttagcctgccgcctcaggtggtttttgaagctatcctgacgcgggaaaaaatgggcagtaccggtatcggcaatggtattgccattccgcatggcaaactggaagaagatactctgcgcgccgttggcgttttcgttcagctcgaaacgcctatagctttcgatgccatcgacaaccaaccggtggacttactttttgccctgctggtgccggcagaccaaactaaaacgcacctgcatactctgagcctggtggcgaaacgtctggcggacaaaaccatctgccgccgtttacgcgcagcccagagcgatgaagagctgtatcaaatcattacggataccgaaggtactccggatgaagcgtaattattcggtaatgtctcttttagacgttgtgaggagaaacagtacatggtactgatgatcgtcagcggacgtagtggtagtggtaaatctgtcgccctgcgtgcgctggaagatatgggtttttactgcgtggataaccttcccgtagtgttgttacccgatctggctcgaaccctggccgatcgcgagatttctgccgccgtcagcattgatgttcgtaatatgccggagagtccagaaatattcgaacaggcgatgagtaacctgcctgacgctttcagtccgcaactcctgttcctggatgccgaccgtaataccttaattcgtcgttacagtgacacgcgccgactgcatccgctttccagcaaaaacctgagcctggaaagtgctatcgacaaagaaagcgatttgctggagcctctgcgtagccgagcggatctgattgtcgataccagtgaaatgtccgttcacgagctggctgaaatgctgcgtacccgtctgctgggtaaacgtgaacgcgaactgaccatggtctttgagtctttcggcttcaaacacggtatccctatcgatgcagattacgtctttgacgtgcgcttcttgccgaacccgcactgggatccgaaactgcgtccaatgacaggtcttgataaacctgtcgccgcgttcctcgaccgccacacagaagtacacaattttatctaccagacgcgaagctatcttgagctatggttacctatgctggaaaccaacaaccgtagctacttgacggtcgccattggttgtaccggcgggaagcaccgtagcgtgtatattgcagagcaactggcagactacttccgcagccgcggtaaaaacgtccagagtcgccatcgtacgctggaaaaacgtaaaccatgaccgtcaagcaaactgttgaaatcacaaacaagctgggcatgcatgcccggcctgcaatgaagctgtttgaattaatgcagggttttgacgctgaagtgctcttacgtaatgacgaaggcaccgaggctgaagccaacagcgttattgcgctgctgatgttggattctgccaaaggacggcagattgaagttgaagcgaccggtccacaggaagaggaagcactggccgccgttatcgccctctttaattctggttttgatgaagattaatcttcatcactttgacatacaactcccttcaaactccccccgacaataagaaaatcacgtactgaaatcgttctcaatcaacgtcatttgtacattttgtgcgcttttcactttcagaagaaccttaagaaaaccttaagaggcattgtttaggttttgtttaagttaatcgaccatactggagatcgtcagaaaatatttccaggagatggcatgattcgcttatctgaacaaagtcccctgggcaccggaagacatcggaaatgttatgcgcatccggaagatgcccaacgctgtatcaagattgtctaccatcgtggcgatggtggcgataaagagatccgccgtgagttaaagtactacgcgcatcttggtcgccggttaaaagactggagtggaataccgcgctatcacggtaccgttgagacggattgcggaaccggttatgtctacgatgtgattgcagattttgacggcaagccttccattacgctgaccgaatttgctgaacaatgccgttacgaagaagacattgcacaactgcgccagctactgaaacagctgaagcgttatttgcaggataaccgtatcgtgacgatgagcctgaagccgcagaatatcctctgtcaccgcatcagtgagagtgaggttatcccggtcgtctgcgacaacattggtgaaagcacattgattccactggcgacctggagcaagtggtgttgtctgcgtaagcaagagcggttatggaaacgatttatcgcccaaccggcgctggctattgccctgcagaaagatctgcaacctcgtgagagcaaaacgctggccctcactagccgcgaagcttaatccagctggtgttgttgcataaacggctcaccgcctaactgatacatctgccgtaaaatccacgcctgacggctacgcacgtagccgcttgggctggagactttgaaacgaagtggattaggtaatacagctgccagtaatgcagcttcgctccgggtaagtttgctcgcgggtttgtggaaataacgttgtgccgcagcttcgacgccaaacacaccgtcgccaaattcggcgatattcaggtaaaccgtcaggatacgctttttgctccagaccgtttctatccccagcgttaatccggcttccagcccttttcgaacccagctacgcccatcccataaaaagagatttttggctgtctgttgagaaatcgtactagcaccgcgaatacggttttcattgcgctcgttgtgcgccagggctttctcaatggaagcgacatcaaagccccagtgctcaggaaatttctgatcttctgcggcaatcaccgccagtcccatccacgggctgatttgatccatactgacccagtcagaatgtgccacgtaacgaaaattgccatgcagccaggcgctgacctgtcgctcgaccattaccgcactgaagggaacaggcgcaacgctaaacaacgcgatgcccccgccccagaaaacggcgaggacaaccattaaccgcaaaagaaaacggcgaacgaaactaaacaccgttaagcggcttttactcattcagccagaaccagcacgcgggaaaccagcttatcaatgccgctcgccgcttctgcaatgttctgcgccagcatatatgctggggtggtgacaatcttattgtcttcatcaaccacgatatcatcgacaggacacggcacatgctccgcgcccatctcttccagcacttctgcggtatcgatatcagtaccgatggtcaaacgcagcgggaaatcgaaaattttcggcagcatcgccggggcaatacacataaaaccaagcggttttccggcctgatgcatcgcttgtgccagcgcctttaattcacggtcaacggtgcattcgctaccaagactggcaaaattgcttaaattcttcgccgcgccaaacccccccggcacaatcaacgcatccagttcagcggcatcggcctgggccagaggacggatttcaccgcgcgttattcgtgccgcttcaatcagcacattgcgcgtttccgtcatcgcttcgccagttaaatggttgataacatcaacctgctgcttatccggtgcaaagcagaccgcctgcgcaccgctgcgactaatagctaacaacgtcaacaccgcttcatgaatttcagaaccgtcatagacgccgcatccgctcagaattacgccaattttcttcattgtgatcatcctttcgcaattgactgaaacacattaatttttttaataaaaatggtacgcatcacacatttaactgattcatgtaacaaatcatttaagttttgctatcttaactgcgtgcggcctgaaaaacagtgctgtgcccttgtaactcatcataataatttacggcgcagccaagatttccctggtgttggcgcagtattcgcgcaccccggtctagccggggtcattttttagtggcttttgccacccacgctttcagcacttctacgtcgtgacgccactcttctttcatctcttcaatccattcaccgacgttatcttcccaggccggaaggtcaggagactgaatttgctgacccagctgttgcagatggcgtaaccccacactccccgccgcacctttaattttatgtccttcctcaacaatgccttttttatcctgcgccgtcagattgctctccagcacgctgacatagcccggcatcatcttctcaaacaccgctaacccgtcggtgatcagcttcggtcctacaagttcgagatactgttccagcatgggaatatcgagcaatgcttcacttttactgttctcttctgtcgtcaccgtactctcctcatcatcctgggtatcccagaatttcttgatcatcgcggttagcgccggaacagaaagcggcttactcagcacatcatccattccagcattgaggtactcttgtttgtctttcagcacgttagcggttaaggccaccagcggcggtaaatcctcgcgcggataacgtttcgtcagttcacgagagatatccagcccggtcatatctggcaactgaatatccagcaacaccaggtcgtattcgcccggtttaaacatctccagcgccgccttgccggtcatggcgacatcaacgctgttacctaatttttccagcacagaacgcgcaacaatcacgttcagttcaatgtcttccaccagcagcacattcagcgccggtaaaggcatatcgtcttcatcaaacgcatcatcgacctcttctgctacgctcggtgcgtggatcgtcaacgtaaaggtactacctttgccctgttcgctggtaaccgtaatatcgccgcccatatttttcgccagacgacgagaaacggccagaccaataccggtgccggtggcaggtttaccgccatgactgtctttcacctggtaatacatggcgaaaattttatccagctcatcctgcggaatgccgataccagagtcttccacttcaaaatgcagcatatcgccttcatcgtagcgcacgcgcacggtaacctggccttgctgggtgaatttgacggcgttactgatgaggttccacaggatctgccgtaaacgcgtcccgtcggtaatgacctgatgcggtaatggcagcgtcggctccaggttaaagcgcaatcctttttgttgcgcctgcaatgcggagagattttccagatcggcaaggaagctggtgaaatcaaccggttgattatcaagctggaccttgcgccgttccatcttatccatgtcgataatatcgttaaagatattccccagcgtgacggcgctaacatggatggtcttgagatatttttcctgctcggcggtgagttcggtatccagcagaatgcggctcagaccgacgataccgttcagcggtgtacgcaattcgtgactgatggtggagataaacgtcgttttgtcgcggctggcccgttcaagcgcatcctgataccgcttacgctcggtaatgtcgcgaccaaagcccatcaaaccgtgacgtttacccacgcggtcgtagtacggcactttacggatttcaaagcaggctttgcgcccgtccgggtaatccagccactgttcataggtcagactcacattatgacggaacactttttcatcggtttcaatgacttttgcggcggcttccggactgtaaacatcagcaggtttcaggtgaaccagttgtttttcgctttttccggtcagcagctccatcgcgcggttacagccggaaaactctttatcttcgttacgataaaaaaccaggtcgggactagcatcaaggaaggaacgtaagaaactggattgctgctcgagctgaatttgtgtctcttcgcgctctttgatttcaattttcagttggccgaaggtttcctgcagttctgcttccgctttttcacgaacggcaatttcctgatttagctgggcaatattatcttttaactgaacgttgaggctcaaatcgcgctcgcgcatctcctccagtttttgcaccagccgactcagacgttgtcgactctcctccagttgctcgacgaccacgcttagaaagtagaccgcccacggcgtaatcagcaaaccaaagaagatagaacgaataacatcaatgctttcgacctgaccatgcagcaccatggttaccgccatttgtaccacaatggcaagaacgacgagggccagcgccagcaacatactgaagcgcaccagacctaacttcatcatcaggtcaacataatactgcgccagcagacgaatttgcttcattagggaattccttcacgacaacctgccccaataatacccaattctgacagttacgttataaattgtgtgagaaatgcggaattcccctcaacgacttactccgttggaggtagccacggacgtcccagcgcgcttccctgtacgccatgttcattcagatagcgatccagctcgaccattcccgtccatcgattttcgcaccacagcggagcaagcagcgtcgggcgacgggcgctggcggaaatgcggtggtagatcacttccggtggcgtatggcgaatcatttctccggcagtgagcgtgtaatcctccagttcaataccgttcaaacgccccgcttcccaggctttcgccataatgctgcctttcacaatatgcagcggatgcagctttatgccgtccacgccggtttcaaccactcgctccagcgtttgcaaacattcagcctgcccttcgccaggcaggccgacaattaagtgggaacacaccttcagcccgcgctgacgtgccagctgggttgtacgctgataacaggcaaaatcatggccgcggttgatgcgatgcagtgttttgtcgtgggcggtttgtagccccagctccagccacacttcgtaaccctggtccttatattcgcaaagcagatccagcaccgcatccggcacgcagtccgggcgggtacccacacacaaaccgacaatattggcctggctcaccgcctgctgatacatagaacgcagcacctgaacttccgcaaaggtgctggtatacgcctgaaagtaggccagatagcgtttagcgcggttaactaaattcgcctggtgcgccagttgctcggcaatggaacgatgctgctgcgcttcatcggcaaagctggcaacattacagaatgtgcagccaccacgcccgatggtaccgtcacggttagggcagctaaaaccgccgtgcagcgtcagcttatgcaccttttgcccataacgacgggtgagatcaccaccaaacatattgactaatttctgtaactgcataatctgatagaccgcgccttgaaaagaggccaaagcctgccatttttagctcaattcggcgatgacctggatcaatcgtcccggcctgcttttatcaactgcataatcaatcaaaattaccgaaatttcatgcataatcacataaatcacttttgcttatcttgtgtcagatttttttatctcctgatggattttaggcaaaaacagtagcatgaaacgtcattaccaattaaggcagtataaaatgctggttttgtcgtcagttcaaggcaggataagggttaacacacctttatgacagtcaggaattgactgtttctctaacgacttcccttttagccttaaagataaaatccattttaatttcagtcatttaataaagaattttgcgctaaagcacatttctgtaccaataagcttgccatttgacctgtatcagctttcccgataagttggaaatccgctggaagctttctggatgagcagcctgctcatcatatttatgcagtaattgagatcccctcttcaccgtattaaccgatgcgaaaaggacaacaagggggcgaatgcgaggcgcgcgtatgacacgcaaaccccgtcgccacgctctttctgtgcccgtgcgcagcggtagcgaagtggggttcccgcagagcctgggggaggttcacgatatgttgtacgataaatcccttgagagggataactgtggtttcggcctgatcgcccacatagaaggcgaacctagccacaaggtagtgcgtactgcaatacacgcactggcccgcatgcagcaccgtggcgcgattctcgccgatggtaaaaccggcgacggttgcggcttgctgttacaaaaaccggatcgcttttttcgcatcgttgcgcaggagcgcggctggcgtttagcaaaaaactacgctgtcgggatgctcttcctgaataaagatcctgaactcgccgctgccgcacgccgcatcgttgaagaagaactgcaacgcgaaaccttgagcattgtgggctggcgtgatgtccccactaacgaaggcgtgctgggtgaaatcgccctctcctctctgccacgcattgagcaaatttttgtgaacgccccggcaggctggcgtccacgcgatatggagcgccgtctgtttatcgcccgccgccgcattgaaaagcgtctcgaagccgacaaagacttctacgtctgtagcctgagcaatctggtgaacatctataaaggtctgtgtatgccgacggatctgccgcgcttttatctggatcttgcggacctgcgtctggaaagcgccatttgcctgttccaccagcgcttctccactaacaccgtaccgcgctggccgctggcgcaaccgttccgctatctggcgcataacggtgaaatcaacaccatcaccggtaaccgccaatgggcgcgtgcgcgtacttataaattccagacaccgcttatccctgacctgcacgacgccgcaccgttcgtcaacgaaaccggctctgactccagtagcatggataacatgctggaactgctgctggcaggcgggatggatatcatccgcgccatgcgtctattagtaccacccgcctggcagaacaacccggatatggacccggaactgcgtgccttctttgactttaactccatgcatatggagccgtgggatggcccggcgggcatcgtgatgtccgacggtcgttttgccgcctgtaacctcgaccgtaacggtctgcgtccggcgcgctacgtcatcaccaaagataagctcatcacctgcgcctctgaagtcggtatctgggattaccagcctgacgaagtggtcgaaaaaggccgcgtcgggccaggcgaactgatggttatcgacacccgcagtgggcgtattctgcacagcgcagaaaccgatgacgatctgaaaagccgccatccatataaagagtggatggagaaaaacgtccgccgactggtaccgtttgaagatctgcccgatgaagaagtgggtagccgcgaactggacgacgacacgcttgccagctaccagaaacagtttaactacagcgcggaagagctggactccgtaattcgcgtactgggcgaaaacggtcaggaagcggtcggtagcatgggcgatgataccccattcgccgtgctctccagtcagccgcgcattatttacgactacttccgccagcagtttgcccaggtgactaacccgccaatcgacccgctgcgtgaagcgcatgttatgagcctcgccaccagtatcggtcgtgaaatgaacgtcttttgcgaagcagagggccaggcgcaccgtttaagctttaaaagcccgattctgctctactccgatttcaaacagctcacgacgatgaaagaggagcactaccgcgcagatacgctggatatcacctttgacgtcactaaaaccacgctcgaagcgacagtcaaagagctgtgcgacaaagccgaaaaaatggtacgtagcggcaccgtgctgctggtgctctccgaccggaatatcgctaaagatcgcctgccggttccagccccgatggcggttggcgcgatccagacccgtctggtcgatcaaagcctgcgttgcgatgccaacatcatcgtcgaaaccgccagcgcccgcgatccgcaccacttcgccgtgttgctgggcttcggcgcgacggctatttatccataccttgcctatgaaacgctgggccgcctggtagacacccatgcgattgccaaagattatcgtaccgtgatgctcaactaccgtaacggcatcaacaaaggcttgtacaaaatcatgtccaaaatgggcatctccaccatcgcctcttaccgctgcagcaaactgtttgaagcggtcggtctacacgatgatgtagtgggcctgtgcttccagggggcggtcagccgcattggtggagcaagctttgaagacttccagcaggatctgctgaatctgagcaaacgtgcctggctggcgcgtaagcccatcagccagggcggtctgctgaaatacgtccacggcggcgaataccacgcctacaacccggacgtggtgcgcacgctgcaacaagcggtacaaagcggcgagtacagcgactatcaggaatacgcgaagctggttaatgagcgtccggcaaccacgctgcgcgatctgctggcaattacgccgggtgaaaacgcggtcaacattgctgatgttgaaccggcaagcgaactgtttaaacgctttgataccgccgcgatgtctatcggcgcgttaagcccggaagcccacgaggcgctggcggaagcgatgaacagcatcggcggtaatagcaactccggtgaaggcggcgaagacccggcgcgctacggcaccaacaaagtgagccgcatcaagcaggtggcttccggtcgctttggggttactccggcgtatctggtcaatgccgacgtcattcagattaaagtcgcccagggcgcgaagccaggcgaaggcggtcagttgccgggtgataaagtcacgccttacatcgccaaactgcgctatagcgtgcccggagtgacgctgatctccccgccgccgcaccacgatatctactctatcgaggacttagcgcagctcattttcgacctcaagcaggttaacccgaaagcgatgatctccgtgaagctggtttccgaaccgggagtaggcaccatcgcgactggcgtggcaaaagcttatgcggacttgatcaccatcgcaggctatgacggcggcaccggcgcaagtccgcttagtagcgtgaaatacgcaggctgtccgtgggagctggggcttgttgaaacccagcaggcgctggttgctaacggcttgcgtcacaagatccgtttgcaggtcgatggcggcctgaaaacgggtgtcgatatcatcaaggcggcgattctcggcgcagaaagcttcggcttcggcactggcccgatggtggcgctcggctgtaaatatctacgtatttgccatctgaacaactgcgcaacgggtgtagcaactcaggatgacaaactgcgtaagaaccactatcacggcctgccattcaaggtgacgaattactttgagtttatcgcccgtgaaacccgcgagctgatggcacagcttggcgtaacacgtctggtggatctgattggtcgcaccgacctgctgaaagagctggacggtttcaccgccaaacagcagaagctggcgctgagcaagctgctggagactgccgaaccgcatccaggtaaggcactctactgcaccgaaaacaacccgccgtttgataacggcctgctgaacgcgcagttgctgcaacaggcgaaaccgtttgtcgatgagcgccagagcaaaaccttctggttcgatattcgcaacaccgaccgttctgtcggcgcgagccttagtggctatatcgcccagacgcacggcgatcaggggctggcagccgatcctatcaaagcgtacttcaacggcaccgcaggccagagcttcggcgtgtggaacgcgggcggcgtggaactgtacctgaccggtgatgccaacgactatgtcggtaaaggcatggcgggcggcttaatcgccattcgtcctccggttggttccgccttccgcagccatgaagcaagcattatcggcaacacctgcctgtatggcgcgaccggtggtcgtctgtatgccgcaggccgcgcgggtgaacgtttcggcgtgcgtaactccggtgctatcaccgtggtagaaggcattggcgacaacggttgtgaatatatgacgggtggtatcgtctgcattctgggtaaaaccggcgttaacttcggtgcgggcatgaccggcggtttcgcttacgttctcgatgaaagcggcgatttccgcaaacgcgttaacccggaactggtcgaggtcttaagcgttgacgctctggcgatccatgaagagcatctgcgtggtcttatcaccgagcatgtgcagcataccggctctcagcgcggtgaagagattctggcgaactggagtaccttcgccactaaatttgcgctggttaaaccgaagtccagtgatgtaaaagcactgctgggtcaccgtagtcgtagcgcagctgagttgcgcgtgcaggcgcagtaaggggtagcaacaatgagtcagaatgtttatcaatttatcgacctgcagcgcgttgatccgccaaagaaaccgctgaagatccgcaaaattgagtttgttgaaatttacgagccgttttccgaaggccaggccaaagcgcaggctgaccgctgcctgagctgcggcaacccatactgcgagtggaaatgcccggtacacaactacatcccgaactggctgaagctcgccaacgaggggcgtatttttgaagcggcggaactgagccaccagaccaacaccctgccggaagtttgcggacgagtctgcccgcaagaccgtctgtgcgaaggttcctgcactctgaacgatgagtttggcgcggtgaccatcggcaacattgagcgctatatcaacgataaagcgttcgagatgggctggcgtccggatatgtctggtgtgaaacagaccggtaaaaaagtggcgattatcggcgcaggcccggcaggtctggcgtgtgcggatgtcctgacgcgtaacggcgtaaaagccgttgtcttcgaccgtcatccagaaattggcgggctgctgaccttcggtattccggccttcaagctggaaaaagaggtaatgacgcgtcgccgtgaaatcttcaccggcatgggtattgaattcaaactcaataccgaagtgggccgcgacgtacagctggacgatctgctgagtgattacgatgccgtgttccttggcgtcgggacttatcagagtatgcgcggcgggctggaaaacgaagacgccgatggcgtgtacgcagcgctgccgttcctcatcgccaacaccaaacagttaatgggctttggtgaaacccgcgacgaaccgttcgtcagcatggaaggcaaacgcgtggtggtccttggcggtggcgacactgcgatggactgcgtgcgtacgtccgtgcgccagggagcgaagcacgttacctgtgcctatcgtcgtgatgaagagaacatgccgggttcccgccgcgaagtgaaaaacgcgcgggaagaaggcgtagagttcaaattcaacgtccagccgctgggtattgaagtgaacggtaacggcaaagtcagcggcgtaaaaatggtgcgtaccgaaatgggcgaaccggacgccaaaggccgtcgccgcgcggagatcgttgcaggttccgaacatatcgttccggcagatgcggtgatcatggcgtttggtttccgtccacacaacatggaatggctggcaaaacacagcgtcgagctggatagtcaaggccgcatcatcgccccggaaggcagcgacaacgccttccagaccagcaacccgaaaatctttgctggcggcgatatcgtccgtggttccgatctggtggtgaccgctattgccgaaggtcgtaaggcggcagacggtattatgaactggctggaagtttaagcgaggtaacaatgaattcgccagactgtgtctggcgaatcaaattactgacgaagtgcgcgttgttttctggcaaatgcggcatgagcgtttgacctttcctataatagggataattttcaataaattgtgctttgttcaccaagtctgatgagtgaagcacatcaagcaatttctcatttacaatccgtctcaattacttgttaacacctctgacaataccgattctgcaagctattcagtcttttcattccatgtaaattgtctcgatattaatatacaaaatatgaatataaaaaaccaatatattatccttaattatctatatattttcctatttttcagcgcaaacattcatgtaatgaataattatcaccacaaaccacctcaccagcaccttattattcacatgatcgtaactataaaattcattaaataaatacatcccagcaagttggctatttctgaacgagttatttatttacattcacaaacagatatatatactgcttcagctttttattttaaaaaataaatttgttattaaggatatgttcatatgtttttcaaaaagaacctcacaacagctgctatttgtgcagcactttctgttgcagcattcagtgccatggcaacagatagtactgatacagaattaactatcatcggcgagtatacccctggtgcatgtaccccagttgttacgggcggcggcattgttgactatgggaaacatcataacagtgcgctgaatccgaccggtaaaagtaataaactggttcaactgggccgcaaaaacagcacattaaatataacctgcacagcaccaacgctaattgctgtaacctccaaggataaccgtcagagcaccattgtagcgttaaacgacacatcctatattgaaaaagcttatgatactctcgtagatatgaagggaacgaaaaacgcctttggtttaggttctgcgcctaatggacaaaaaattggcgctgcatccattggtattgacaggtctaatggtgggattcacgcggcggacgatacaggtgaaattcctgtcgacctgattcaaactgaccactggagtgcagcgacccccacatggaaagccagttctaatggcgcattctgcagcctgacaagttgcagtgcaatcgagcgcggttattctgttgcaaaaacaggggaactgacacctgttgctattacagcggtcaccttcccgttactgattgatgctgcggtaaatgacaatactattcttggttctgatgaaacgatcaaactggatggtaacgtcactatcagcgttcagtatttataagaacttgtaatacagtttttatttttacgcattaaccagttagctataactcggacagattatgccctatgacatggtctgtcttaatcaatctcatcgcaaacagtgcataacatatattaacaatatgtttctgcgttatttatcattattacaggagttttaatttaaatgctcagacacattacattcactgtatttataacaacatcaatgaatactaacaatgccggacaggagtactatcaggcattcgttttatacgatcggttaatgtttcaggaaagctcttcgcatatcttggggaaagtaaatgtaatacgctgttcttaattgttcagtgctcaccccccagagtatagctcattccattattcaacttagctccatataaagggacagataatggaaagcctcagtgaaggaaccacagcaggctaccagcaaatccacgacggtattattcatctggtcgatagcgcccggacggaaacggtacgtagcgttaacgcgttaatgaccgcgacgtaccaggaaattggccgacgaattgtcgaatttgaacaaggtggcgaggccagggctgcgtatggtgcgcagctaatcaagcgactaagtaaggatttatgtctaaggtataagcgtgggttctctgcaaaaaacttacgccaaatgaggcttttttacctcttttttcaacatgttgaaattcaccagacaatgtctggcgaattaacaccattgggaattccgcagacaccgtctgcagaattcccaagcgcaaagatttggcagacgctgtctgccaaatctttccccttgcccaggtccacctacgtccgtttactttccgttaaaaacgctgacgcccgcagcttttatgaaaaagagacgctccgctgtggctggtctgttcgccagctagagcggcaaattgcgacccagttttatgagcggacactactgagtcatgacaaaagtgccatgctgcaacaacacgctcctgccgagacgcatattcttccgcaacaggcgatacgcgatccctttgtgctcgaatttctggaattgaaagatgaatatagtgaatccgattttgaggaggcgctgatcaaccacctgatggatttcatgctggaacttggggatgattttgcctttgttggtcggcagcgaaggttacgcattgatgacaactggtttcgtgtcgatctgctgtttttccaccgccgtttacgctgcctgctaatcgtcgatctaaaagtgggcaaattcagctatagcgatgccggacagatgaatatgtatctcaactacgccaaagagcactggacgctaccggatgaaaatccgcccatcggtctggttctctgtgcagagaaaggagccggagaagcgcattatgctctggcaggtttgcctaacaccgttctggcaagcgaatataagatgcaactacctgatgagaaacgactcgcagatgaactcgttcgaacacaggcggtgctagaggaaggctatagacgccgttaatttcagcggtttcgaattctgcagacagtgtctgcagaatctttaaaacgaactaagttttaagccattaaatcagccttaaccttcaccacaacctttttaatctctccaggctcgccgacaacgcatcctggtttatgcggttcacctggcataaacacggcgaacattcccggttttaagatgatggcttgctcgttatcaatggtgctgcaaagctgataatcatcctcatggtggaactcttcacactgacgcgcagtgcctgccatgccaaacagaatccgttcctcaccgtttaataacagctggatatcaatgtattgctcgtgcaattccgcttttttctcgacggggctttgagtgttaaacgtcatgacattcataaagatattgtcgccctgtaattcgtaacgacccggcgctttttcttgcggtctggcagctaatgccagcgttaacgcgtcctgtaacgcaggatgtaacccagcagacggtaaactctgtacttcacccatcatcataatttttctccctgggccaacagcgtagccccaagtaaacctgcatcatggcggtaatgcgccgccagtaaatcaacatgaaatgccgctggctcctgcgccagatacgtttccaccagcgccagatacccttctgccagaccaacgctgccaccgaccaccacgcactggcaatcagttgtggctttaatatcagcgatcagccttgcaagcgtacgtgcggagcggtgaatcagctgctgcgcctgctcgtcaccctgcccggcgcgcgtgaaaatagttttcgcatccgcgccagccaactccccctgcgctgccgctgcaatgccgcgaccagaagcaatcgcttccacgcaacctgtgcgtccacagccgcagactgggccgtgtggatcggcaagcgtatgcccgatatgccccgccagaccgccagggccggtaagcagtttgcagccgctcactacaccgccgccaacgccggtggaaacggtgataaagaccatatcggttatatcgccatccagcgcctgaaactccgcccatgctgcggcctgcgcgtcgttaatggcaatggtcggcaaattggtaagttgttccagcgttttgactaacggaaagtgtagcaatccaccaagattatgcggattaagtgccagcaagctgccgtcacggattatcccggtgctagcgatggcaacccgctgcgcatgagcttgcaacggagagactaatgcggataaggcatcacgcaaggcttctggtgtctggctggctggcgtaggaagttcacgacgatcgcggatctgcccgtcagcgccaatcagcgcggcggcaagtttagtaccgccgatatcaatcgccagtgtggtcatagcaccgcctttttcatcgctgtgttgtaccactgacaaatgtgctcaagacgcgtgattgcagaaccgaccgtcaccgcccacgcgccgtggcgcatcgcatccgccgcctgagcaggcgtgttgtaacgcccttcggcaatcacccgacatccggcgtcgctcaacgttttcaccagcgccagatccggctcttctggcgtttcaggcgtggtatagccagaaagcgtagtgccaataatttcggctcccagcttttggcatgccaggccgtcttccggcgtactgcagtcggtcatcgccagtaaaccgtgatggtgaatacgtgccagcagcgtttcaacaggcaccggacgcgggcggtcggtgccgtcaatggcgataatgtccgcgcccgcctgcgccagcgcatcaacatcttcaatataggccgtgatgcgtaccggagaatcctccagatcgcgtttcacaattccaataatcggcacgctcaccaccgcacgcgtggcttgcagatttgccacaccttcaatgcgaatggcaaccgcgcccgcctgttctgccgctaatgccatggcggcgacgatttcgggtttatcgagcgggctgtccggaaccggctggcaggagacaatcaggccaccgttagcagcgattttttgatccagttgtgcaagtaagctcatacatcttcccttagcgaaaggcccggtacatagaccgggcaacaggattaacttttggttttgactaaatcgtttttggcgctgccaaacggcacggcaccgctgaatggtttaccgtcgatagcgtcatgagtacgcaacgcttccgggcgcaaccaacgctgaacgcgagaaggcatatccagcccaatcagcaggatcaccacgaacgtcagactgaagctgaggcttgccagcgcagtacccagatccagacgttgagcgatcaacgcgccgatgattggggccagtgcaccgcccaatgcgccaacgttgtaggtaaagcccaggcccgctgcacgctggtcggtatcgaaataaccgccaatcagttttggtaagatcccggcgatcccttgtccaagcatttgctggaagaacagtaacagaccgagcacccagacgtttgcgccgccaatcgcaaataccggaataatcagcagctggctggccagcaggctacaaacgtacgctttgcgggttcccagccagtcaccgaggaagccacctacgcagcatcccaccgccgcgccaaagccactaaagaacagcacattggctacagtatgcgggttataagccagatcggttttcagatacgttggcagcagcgcctgaatcggccaactgtagaggaaagcaaacaacacgaccaccatcagcattacgcccgttggccagcgtttgcctgcactctgcaccataaagctgataaagattgcggcgcataacagcccaagaacagcgacgatcgcggcattttgcaggttaccggcgaagcagaaccacagcgcagtagccgccgccagtgtcattacgatattggcaatgcgatgttcaccacggtagagaatatccaccattgtgcgtactggtgctttacctgcgtgtttctctttccagtcttccgcttccgggatgtttttacgcagccagagagcaaagatgattggcaaaatgccgataaagaacagcgcacgccagccccagaccggaaccaccaggctatagacctgagcggcaacgacggcccccacagagaagccactaatcaaaaaaccactggctttgttacgcagatgttttggccagctttcaatgacataggtggcgctggaaccgtattcacccgccatccccatgccgatgaccagacgagcgataaacatggtgatgtagcctggcgcaaagccgcaggccagcgtcccggcgctgaagagaacgatgctggtgaccattgccagacgacgcccgtagcggtcacccatagcgccgagcatcaggccgccgaaccagcgagagataaaggctgcagagatcagacttgccgcctgcaccgtcgtcagcccgaattcaccttgtacttcggtgagtaccagggcgattaaaacgaaatcaaaaccgtcaagcagatatcccaaccaggcagcggaaaatgcgcgccattgtgcacggttgagatggcgataccacgggatattctgggttgtagtactcattgtgagtctcccgcggtgggcgatgcccacacgctttggtatgaaaattgtagggtacagatgcgtttatttcccctcacccggtaggggcgagcgaggggaaacaactcacccgcgctcttgcatcaactgctgggccagcgccttcagttctggcagatatttttcatctaccggtccaaacggtttgcggcacagcggcacagaaacgacatccatataatggaggacagttttcaggccgcggaatacgcccgttttgatcagtaaatcaatgactttattgcattcagtttgcagtttctgcgcggtctggatatcgccttctttcagcgccttaacgatcccctgatagcgccagcccatgatgttgtaggtactgccgataccaccatcagcgcccgccagcagaccagaggcgaagatttcgtcgtaaccgttatagagcacaagatcaggatgttcacgacggatctgctccatctgatagagatcgccagaggtctgtttcagcgcacctacgccaggcaatgtaacaagtgtgttgatctgatccagggtcagttttaccccactcagggctggaatgttgtacaccaccatcggcaaaccatccgcgctatcaataattgcccgatagtgatcgcagtgttcttcaaagctgaaaggatagtagaacggcgtgacggcggagacggcatcgaagccataacgtttagcgcttgccgcaagttgttggctttcggcggtgctgacgcaaccgacgtgggcgatgagtttaatcttacctttcgcctcttcggcgacgatttccagtacctgttcacgctcggaaaggctttgtacaaaggcctcgccggtgctaccacccacgtataaaccgtcgatgccctgctgaatattgaactgaaccaggcgacgcagactcgctttatccagtgcttgttgttggtcaaaaggagtcaggagtgcagccattacgccacgtaaattcgttgccataaatacctctgaagtgatgcttgtctgataaacgatatacctttatacctgttataccagatcaattaagcaacaccccatacagaaagcttataatgcgatctgcttcactaaagtggcattatttctttttgttggtggtctgaccgaaagcgtgccaggtagcagagacgctgttgagatggctttgcaacgcacgatcggcttcgtcaggatcatgacggcggatcgcatcaacgatcgcaatatgctgttgataactaacgttgttatgttcgtgcagtgcctgatcggtaaccgttgggcgtgcggcaataagccagtcgagcagggcaacgtggatcgccatgaagattgggttaccggggatctccgccagcacgcggtggaaatcaacgtcactacgaatgaatgccgcgttgttatccaggctctgactgttgatttccagtgcttttgccagcaaatcgatttgctcatcggtggcatgttcagccgcatagcgcaccagactggattcaaagaacagacgtaattgttcgaaatgggcaatcccaccgggatgagaaaggaaatctttcgccatgccggaaagctcaccgatgatagtgtccgcagaaggacggctgacgcgagcgcgttcgccgttgtttatttgcaccagacctttgcgttttaacgctgccagcgcttcacgcacgctaggacgcccgacgttaaagaacgccatcagttcgcgttcagacggtaattgttcaccttcgccaaattcacgacggcggatcatctgttccagctcttcttccaccatttcggagagttttttacgcgccagcgggcggctacgcaagttgcgaccaattgcaggactagaatcttcggtttggctatcaaatgcgttcataaggcccattctgtaaggtcagtgtgattaacatcatcagtgacatcctatcacaggattgaaagtaggggaaaatggcagggttttctctttgtgcctcatcattaccataattaacggaataattaactattgcgaaaaattaatgtaacgcagataaaaacatcccgtttgaattatttataagactattcacgagcattatgaatattatgaatgtgttcttacaaaataatcataagcgcatattttttaatgaaaaatcacctcacctacaattaaaaacacgacatccgcaccataaatagccttgcaaaaaatataacatcgttgttttcaatctgccgtttatgggattgaccgttttcttttgacacggagttcaacaatgttcggcataattatatctgtcatcgtattaattacgatgggctatttgatcctgaaaaactacaaacctcaggtggtgctggctgccgcaggtatcttcctgatgatgtgcggtgtctggttagggttcggtggtgtactcgatcccaccaaaagcagcggctacttgatcgtcgatatttataatgaaatcctgcgcatgctgtccaaccgcattgccggattggggctgagcattatggcggtgggcggttatgcccgctacatggagcgcataggggccagtcgcgcgatggtgagcttgttaagccgcccgttaaaactcattcgcagcccgtatattattctgagcgcaacttacgtcatcggccaaatcatggcgcagtttattaccagcgcctccggtctgggtatgttgctgatggtcaccttatttccgacgctggtgagtctgggagtaagtcgtctctctgcggtggcagttatcgcaaccacgatgtccattgagtgggggattctggaaacgaactccatttttgctgcccaggtagcgggaatgaaaattgccacatacttcttccactaccagcttccggtcgcctcttgcgtcattatcagcgtggcgatctcccactttttcgtgcaacgcgcttttgacaaaaaagataaaaatatcaatcacgaacaggcagagcaaaaagctctcgataatgtcccgccgctctattacgccattttacctgtgatgccgttaatcctgatgctcggcagcctgttcctcgcccacgtcgggctgatgcagagtgaactgcatctggtggtggtgatgttactgagtttgactgtgacgatgtttgttgagttcttccgcaagcataacttgcgcgaaacaatggacgatgtgcaggcgttttttgacggcatgggtacgcagtttgccaacgtggtaacgctggtggtcgcgggtgaaatatttgcgaaaggcttaacgacgattggcactgtcgatgcggttatcaggggggcggagcattctggtctgggcggtattggcgtgatgattattatggcgctggtcattgccatttgtgccattgtgatgggctctggcaatgcgccgtttatgagttttgccagtcttattccgaatatcgcagccggactacatgtaccagcggttgtaatgattatgccgatgcattttgccacgacgctagcgcgcgcggttagcccgattactgcggtggtggtcgttacgagtggaattgcaggcgttagcccttttgcggtggtgaagcggacagcgatccccatggcagtcggtttcgtggtgaatatgattgccacaatcacgctattttattaagtcattaaaaagacaaaacaggccgcctgggcctgttttgtattacttcacaacgcgtaatgccggtcgaccaccgcgtggtggctgcggaggttcatcgtcaggatgagtgtcatcatcgtgatctggcttgtcgccatcaataacgctcataacggtttcgttgtctgcgcttgcctcttcatcattcatgatgctggtatcttcatcgtaggcagcttcaggctcaaacatcgtgcctgcgccattttcacgggcgtagatagccagcacggcagccagcggcacagaaacctgacgcggaatgccaccaaagcgcgcgttaaagcgcacctcatcattcgccagttccagattgccgacagcacgcggcgcaatgttgagtacgatttgcccgtcacgcgcatattccataggaacctgcacgccagggagcgtcacatccaccaccaggtgcggcgtgagctggttatccagcaaccactcatagaatgcacgcagcagatagggacgacgtggtgttagctgactcaaatccatacagattaactccggcccagacgcatttcacgttctgcttcagttaaagaagcaaggaaagagtcacgctcaaagacgcgggtcatatagcctttcagctctttcgcacccgggccgctgaactcgatgcccagttgcggcagacgccacagcagcggagcaagatagcaatcgaccaggctgaactcatcgctcaggaagtacggcttctgaccgaagaccggcgcaatcgccagcagttcttcgcgcagttgcttacgtgcggcatctgcttcagaagcactaccgttgatgatggtgttcatcagcgtgtaccagtctttttcgatgcgatgcatgtacagacggctttcaccgcgagctaccgggtaaacaggcatcagtggcggatgcgggaaacgctcatccagatattccataatgatgcgagattcccacagggtcagctcacgatccaccagggtcggaacgctctgattcgggttgaggtcaatcagatcctgaggcggattgtccttttccacgtgttcgatctcgaaacttacacctttctcagccagcacaatgcggacctgatggctatagatgtcagtaggaccggaaaacagcgtcattacgctacgtttgttggcagcgacagccatgaaaacctccaggtatagtcagaatttttactgctaccagccaccaggtggccagtcagaagttgtgttacccaataaggaacgactctctttgttcgaaaatcaaacaaaaaatgagcaatacccgacatttgggcagaaaattggatgatagtttaccagattttgcgaccattgtggtgagtcgatgccggaaatggggaaaaagagatgcgctttagtctgaaatagttgacttagtcccttattggcgatgtggtttttgttttacctgtctgtcaggtggcagcaaaaagcaactttccagtttttacgctgattcagattttagctataaaaaaacccgccgaagcgggttttttcgaaaattgttttctgccggagcagaagccaattaacgtttggagaactgcggacgacgacgtgctttacgcagaccgactttcttacgttcaacctgacgagcgtcacgagtaacgaagccagctttacgcagttcagaacgcagggactcgtcgtattccatcagagcgcgggtgataccgtgacggatcgcaccagcctgaccagagataccaccacctttaacggtgatgtacaggtccagtttctcaaccatgtcgaccagttccagcggctgacgaactaccatgcgggcagtttcacgaccgaagtactgttccagagaacgttggttgattacgattttaccgttgcccggtttgatgaaaacgcgagctgcggaacttttgcggcgaccagtgccgtagtattgattttcagccattgcctataatcccgattagatgtcaagaacttgcggttgctgtgccgcgtggttgtgctcgttacccgcgtaaactttcagtttacggaacatagcacgacccagcgggccttttggcaacatgcctttaaccgcgatttcaatcacacgctcaggacggcgagcaatcatctcttcaaaggtcgcttgtttgataccaccgatgtggccggtgtggtgatagtacactttgtcagtacgcttgttgccggttacagcaactttgtcagcgttcagaacgatgatgtaatcaccggtatctacgtgcggagtgtattccgctttgtgcttaccgcgcaggcgacgagccagttcagtagccagacggcccagagttttaccggtcgcgtcaacaacataccagtcgcgttttacggtttctggtttagctgtaaaagttttcattaaaagcttacccaataaatagttacacgttggtgaacacccaaacgtcttcaattgttgaggttcacacgacaaagtccggcaaacctaccccttcgaatagcctatgccagcacacaaaaagttttgggaaaaaaactttcttgtaacgtggggtcgcaggattatagagaagtcggggtcaaagatcgacccctttttgtgatttgtgacaggttttaacccgccaaatgctcgcgcttcagatactcttcgctttgcatctcttgcagacgactcaggcaacgctggaactcaaacttcagccgatcgccctgataaatttcatacagcggcacttctgcactcaccactaatttgacatggcgctcgtaaaactcatccaccagcgcaataaagcgccgcgcttcgctctccatcaaccgcgtcataactggtacatcaaacaacatgaccgtatgaaagagacgactgagcgcaatatagtcatgctgactgcgggcgtcgacgcacagcgtagtaaaagagaccgccagcgtctggttctcgacgcccattgttgctaatggccgatggttgatttctaacgtcggactattttctcgtttcccccccgccagcgccaaccatagtttatccatttgcgcccgggtttcatcgtgaagtgggctaagccacagatgcgcctgagtgagtgtacgcagacgataatcaacaccagcgtccacgttcattacatcacaatgctgtttaatggcatcgattgcaggcagaaaacgcgcacgttgcaggccatttcgataaagttcatccggcggaatattactcgtcgctaccagggtaataccgcgagcgaacagggctttcatcagaccgccaagtagcatggcatcggtaatatcagaaacaaaaaattcgtcaaaacagagcacgtcagtttcggctttaaagcgatcggcaataatttccagcggatcggtctgcccctgtaaggcagttagctcttcatgcacccgcagcataaaacggtgaaagtgcaggcgctgtttccgctctcccggcaggctttgatagaaaaggtccatcagccaggttttcccgcgtcctacaccgccccacatatataagccacgcactggcgtatgctttgtgtcttcgcgtttaccccacagcttaccgacccgcgccattagcccactcgtcctgggggctggtggcgtgctattgatgagttcctgataaataatttccaggcggctgacggcctctttttgaacgtcgtcgggttgatggctgccttcattaagcgccttcaggtattggcttgttggggtaacgctttgcatgatcttattgttattccttgaataatcggtgcgccgttgttcacggttgacgaaaaaaaggccgttctacactacgcgatatgcagtcgggattccacttctgtggaattaacggttatagtggcataatcagccgcaggcatggagcctgaagccaacaccctacggaaacaaaagacaacgggagatgttcatgacctgggaatatgcgctaattgggttagtcgtcggcatcattattggtgctgtggccatgcgttttggtaatcgtaaactacgccagcaacaggcgttgcagtacgaactggaaaagaataaagctgaactggacgagtatcgcgaagagctggttagccactttgcccgcagcgcggaattactggataccatggcgcacgactatcgccagctgtatcagcacatggcaaaaagctccagcagcctgctgccggaactgtctgctgaagcaaacccgttccgtaatcgtctggcagagtctgaagccagcaacgatcaggcaccggtgcagatgcctcgcgactattctgaaggcgcatccggcctgctgcgtactggcgcgaagcgcgactaatttatttttcgggcgcagccattgcgccctcctcttctctccctccccgactatcatttaatctggtgtctcattgttagccgtctgaaaattcaataacatcaaactgttttgaatctcttttcttatcattcaggtacgagagcaggaataatgaaaaaacaaacccagctgttgagtgcattagcgttaagtgtcgggttaactctcagcgcgagttttcaggccgtcgcgagcattccaggccaggttgccgatcaggcccctctccccagtctggctccaatgctggaaaaagtgcttccggcagtggtgagcgtacgggtggaaggaacggccagtcagggacagaaaatcccggaagaattcaaaaagttttttggtgatgatttaccggatcaacctgcacaacccttcgaaggtttaggctccggtgtcatcatcaacgccagtaaaggctatgtgctgaccaacaaccatgtgattaatcaggcacagaaaatcagtattcagctcaatgatgggcgcgagtttgatgcaaaactgattggtagcgatgaccagagcgatatcgccctgttacaaattcaaaacccgagcaaattaacgcaaatcgctattgccgactccgataaattgcgcgtcggtgattttgccgtagcggtcggtaacccatttggccttgggcaaaccgccacctctggcattgtttccgcattaggccgcagcgggttgaatcttgaaggtctggaaaactttatccagacagatgcttccattaaccgcggtaactccggcggtgcactattaaaccttaacggtgagttaattggcatcaacactgcaatccttgcgcctggcggcgggagcgtcgggattggatttgccatccccagtaatatggcgcgaacactggcgcagcagcttatcgactttggtgaaatcaaacgcggtttgttaggcatcaaaggcaccgagatgagtgccgatatcgccaaagccttcaaccttgacgtgcagcgtggcgcgtttgtcagcgaagtgttgccaggttctggcagcgcaaaagcgggcgtcaaagcgggcgatattattaccagcctcaacggcaaaccgctgaatagctttgctgagttgcgctctcgtatcgcgaccaccgagccgggcacgaaagtgaagcttggcctgctgcgtaacggcaaaccactggaagtagaagtgacgctcgataccagcacctctagcagcgccagcgctgaaatgatcacgccagcgctggaaggtgcaacgttgagcgatggtcagctaaaagatggcggcaaaggtattaaaatcgatgaagttgtcaaaggaagcccagctgctcaggctggcttgcaaaaagacgatgtgatcattggcgtcaaccgcgatcgggtgaacagcattgctgaaatgcgtaaagtgctggcggcaaaaccggccatcatcgccctgcaaattgtacgcggcaatgaaagcatctatctgctgatgcgttaatgtcgtaaaccgggcatcaggcttacgtgtgatgtccggttaactcgtggtatgctgctgccgttcccttttttaatgacgcctccatcatgtttgtgaagctcttacgttccgttgcgattggattaattgtcggcgctattctgctggttgccatgcctagcctgcgcagccttaacccgctttccactccgcaatttgacagtaccgatgagacgcctgccagctataatctggcggttcgccgcgccgcgccagcggtggttaacgtttacaaccgtggtttgaacaccaactctcacaaccagcttgagatccgcaccctgggatccggtgtaatcatggatcaacgcggttatatcatcaccaataaacacgtcatcaacgacgccgatcagatcatcgtcgccttacaggatggacgtgtatttgaagcattgctggtgggatctgactctctaaccgatctggcggtacttaaaattaatgccactggcggtttacctaccattccaattaatgcacgtcgcgtaccgcacattggcgacgtagtactggcgatcggtaacccgtacaacctcgggcagaccattacccaggggattattagtgccacgggtcgaatcggtctgaacccgaccgggcggcaaaacttcctccaaaccgatgcttccattaaccacggtaactctggcggcgcgctggtgaacagcctgggcgaactgatgggcattaatacgctgagctttgataagagtaacgatggcgaaacgccggaaggtatcggctttgcgattcctttccagttagcaaccaaaattatggataagctgatccgcgatggtcgcgtgatccgcggctacattggtatcggcggacgtgagatcgcaccactgcacgcgcagggcggtggtatagatcaactgcaagggatcgtggttaatgaagtgagtcctgacggcccggcggcgaatgcgggtattcaggtcaacgatctgattattagcgtggataacaaaccggccatctctgctctggagacgatggatcaggtggcggaaattcgccctggtagcgtgatccctgtagtagtgatgcgtgatgataagcagttaacgctgcaggtcaccattcaggaatatccggcaaccaattaagtcgtgcgctcaaaacaaaaaaccggagtctgtgctccggttttttattatccgctaatcaattacttattaacgaactcttcgcccagggcgatatctttcttcagcgtatccagcataccttccagcgcgttctgttcaaatgcgctcagggtaccgatagatttacgctcttccacgccgtttttacccagcagcagcggttgagagaagaaacgggcgtactgaccgtcgccttcaacgtaggcacattcgacaacgccttgttcgccctgcagtgcacgaaccagagacagaccaaaacgtgcagctgcctggcccatagacagggttgcagacccgccaccggccttcgcttcaaccacttcagtacccgcgttctggatgcgtttggtcagatcagccacttcctgctcggtaaaactaacgccaggaacctgactcagcagcggcagaatggtaacaccagagtgaccgccaataaccggcacttcaacttcgcctggctgtttgcctttcagttccgcaacaaaggtgttggaacgaatgatatccagcgtggtaacgccgaacagtttgtttttgtcataaacaccggcttttttcagcacttcagcagcaattgcaactgtggtgttaaccgggttagtgataataccaatgcacgctttcgggcaggttttcgcaacttgctgtaccaggtttttcacgatgccggcgttaacgttaaacaggtcggaacgatccatacccggtttacgcgctacgcctgcagagataagaacgacatctgcgccttccagcgccggagtcgcatcttcaccagaaaaacctttgattttcacagcagtagggatatggctcagatcgacagccacaccgggagtcactggagcgatatcatacagagagagttcactaccactaggcagttgggtttttaacagtagtgcaagcgcctggccaataccgccagcagcgccgaggactgcgactttcatcctaaactccttattatattgataaactaagatatgttgctccgctgccgcgaccttaatccacaaaattgccgtttacaatgaccacatctcaagaatgtgtagtcacgcaagtttagcgtttatgcatttaattgccgtaatcaggaacctaacttacgtaattaacagtcgcttatgcattagcgcaacattccaacaggtggtgacaatataccctaccgttcagccaaaacaacatcaatttgataacaattaatttacttttaagcagaatttgcatgccgtgacgcaggcatgtttctcaataacgaaatttgataaaatcccgctctttcataacattatttcagccttcttcagggctgactgtttgcataaaaattcatctgtatgcacaataatgttgtatcaaccaccatatcgggtgacttatgcgaagcagcgctaagcaagaagaactagttaaagcatttaaagcattacttaaagaagagaaatttagctcccagggcgaaatcgtcgccgcgttgcaggagcaaggctttgacaatattaatcagtctaaagtcagccggatgttgaccaagtttggtgctgtacgtacacgcaatgccaaaatggaaatggtttactgcctgccagctgaactgggtgtaccaaccacctccagtccattgaagaatctggtgctggatatcgactacaacgatgcagttgtcgtgattcataccagccctggcgcggcgcagttaattgctcgcctgctggacagtctgggcaaagcagaaggtattctgggcaccatcgctggcgatgacaccatctttaccacccctgctaacggtttcacagtcaaagacctgtacgaagcgattttagagctgttcgaccaggagctttaatctctgccccgtcgtttctgacggcggggaaaatgttgcttatccctctcaaccccctgctttcccctgcgattaatttaacgaatagtgcgttttactgcgacatgtcattcacacaatgaatacataaggtaaaaaaagcacattatgcaaaattcattatctaattgaaaaaactagaattaacgataaataaccgtatttttaattcttttttgttattaaaattcacatttttaacacttagtatcaactgaaacagttagcgcggtattaattagctcaataattagtgtatacttgattttgtgatatgggtcacgaaacaaaggcccagctaaaagattatgtcgaggtaaaaatcatgaaaatcaaaaccactgttgctgcattaagcgtactttctgttctctctttcggtgcattcgctgccgactccattgatgctgcacaagcacaaaatcgtgaagcaatcgggaccgtatccgtaagtggtgtggcgtctagcccaatggatatgcgtgaaatgctgaacaaaaaagcggaagagaaaggcgcaacggcctaccagattactgaagctcgtagcggtgacacctggcacgctacggctgaactgtacaaataaaccctcatcgtcttgtccgacgatattgcccccggttcgggggcttttttttgcgttaatgacgaacattaaaacgcaaatgcccttccagctcttcctctgcctcatcaaacagcaatattaacgcgccaaaacggcgacgcgttttctctcccagatgaacaaattcaatctcaagtggtagcggcaggacatcgttcattaacacatcccatagactgtcgagatcgcgtaccttatctttcgccagaccaaaggtttggctaaagtcacgataaaaatcctcctgactctcaatctcatcaaaatcaaaggtataaatattcatctgttgccaccgtcacgtttcgcggcgagttctgccgtgcatcgctaagtatagccatgaaaaaaccgacgcttttggcgtcggttttgacttaactatcggtcaacgcatgttgatacttatggagcatccccgccagccgatttaccggttccgtcacctgcggtggcgcttgccagatgcgtagcttttcctggtagatttccagttcttccagcaactggccaaagtaccgacgacgtttatcatcgctacgggcagatatcacatggtctgctgtgcggcgcatttgtcggtgaaacgcgcttaaatcctcgttaaccgggatcggtgcatcacgcaggcgctggtgcgcgataatcatcgtcagcgccaggcgaaatttcggcaaatcccctgggaacttattcatcagcaaaaacagctgctgataaagtgccgggaggtggttctctttacgacgtgccacattggtagtcatcgcggaaacagcggcagaaacaaactgattaagcagtacacgtccggtcctgtcgcggcttttatcccgcaccagcaaaataacggtgaacgcgagcacacagccgacgatttgccctaatgcgctgtcgagaaactgactgaaatggaaagtcatcgggttatccagcacgataatatttatggtgctggccagtgcccccatgctgcccagtcgccgtttctgtacttctataccgaggaagaatcccagcactgccaggctaatgcacagcagcaacatgctctgttgggtattagggataatcaccaaaaagtagagcagccctaacggcagcgcggccagcgtcccgtagataaagtcgatcgccaccatgcgtggattcggcaaacgcattgccagactcgtcactaccgcaatcatcaccattgcaccactgccggaagtccagcccgtccacagccagaaaagcgtgcccagaatgcaggaaagtgtggttcgccagaagttacccattgcatgatgacgttcggcactctctacttttacttccggttcgccttgcaggatctcttcttcggtggcgttgatttttgtgttactgataacgccgcgcttgagaagctgataacgcgttgccgccgcgacccagctataaatggtgacaggcgtttcccgttccccggtccaggcgataactctccgcaggcgtttgagctgcttgtggacgtcctgcgcggtttctaccggcgtgtcaaaaaattcgcggaaagtatcagtgatcaattccgggcgcgtattctgaataagataagtttcgcaggattgggtaatcagcgtcaggcttagcgtattgatcgcttttaaacgtcgattggcccgcgcccagcgggaagattccatattcaggttgctgcgcatgccttgtagcgccgtggtgcgtcgcaccaggtcgccccaggctttatcgacaacttcaccatcgccatgcttgatacagagttgcattaattgatattgcgcgaccagcaaactttccagctctcgatccacttcttgtttgatgcttcgcggagaaaagagcaaatccgccataatcgcacacacaataccgataacgatctcgctacaacgttcgacggcaaactgcggcgtaagcaatggttccggctgaatggtgatcacaatgatcagcgcggtataaccggccagcccccacgcatagctgttttctattcgtaccaggctggatatccaggtacaaaaaccggcccagatacagcacaccagaatcatcaataatggtgcgcggatcatcgcaatgatgatcaccagtccggcaatacagccaataaatgtgccgatgatgcgcaaaaagccacgatagcgaatagcgccagaatacggttcacctcccgcagcaaaggccgtaccggcggcaacaatcgccgctgtcagtaccgcccagcgtggcgtttccagctggaagtgaaagccaacaaacagcgccagtacaatggcggtcgccagttttaccgcaaagcgaatatgttggttagcaatggagaaaatacccatcgtgattaaccaaactcacgcaggcgatgggccattttacggaagaagctatcctggctttcgtcgcgatcttgtttgccagtgaccaccactgtagcagtggtgcccgcaggccagatgttctcttgctggttgtcgagacgaatacgaaccggaacacgttgcgcaagacgcacccattcaaggttagagtctatagtcgccatccctttgtcgtcacgcgtgctgctggcgttggtgacccctgcggcaacactatcaacagtccctttcagcactttgttactgccaagcggcgtgatctctgcacgataccccggacgcaccccttccagcttagtttcttccatataggccagtacatagaaggagttctgtttcaccagcgcaaccgccgtacttcctcgagtaataaactcaccggtatagacgttgaggttggtcacccagccatctgctggcgcgcggatcaccgtgcgttcaagatccagttttgccagatcgcgggtcgcctgcgctttcgctaactgatgcagaaccgtttgtagtacgttgttggcctggtcgatctcttcgcgagacatcgcctgcacaccgagacggttacgacgtccggcctcctggcgtttctcctgtgccagtacctgataataagcaacatcggcttgcgcttcctcaagcgccttttgatagcgcggctggtcgatggtgaacagtatctgtccttttttcaccagctggttatcatgaacattcacctgggtaatgagtccagaaacgtccggcgcgatcgcaacgacgtcagcgctaaagcgcgcgtcacgcgtccagggggattcggtgtaatagacccaggcattaaaaattgcgatgaaggccagaatgactaatacgaccgtgatggccgtacgggagaattttcttattagtgttttcacttcaacctcaaacgaacagtcggcttatcaaataaaacaagcagcaatagagcgcggtgttgaacaacgccggatgccagacaaagtcgtagatacctgttggcacaagtacccggcgcaccagccagaaaatcgccagacttaaaagcaattcaaaaaatatcggtgggaaggacagcccaaacaccacgataacgggaaacagactcatgttgaccttggttgtaaagagagagcaggcgttattattttcagcatctgtcgccgcagagaagggcatggaaagccgggcgagagcaacattgctgtagattgatatttaatatattagcgtaactgttatgctgttatctatattatgtgatctaaatcacttttaagtcagagtgaataatggaacgactaaaacgcatgagcgtgtttgccaaagtagttgaatttggctcttttaccgccgccgccagacagctacagatgagcgttagctccatcagtcagacggtaagtaaactggaagatgagttgcaggtaaagctgttaaaccgtagcacacgcagcattggcctgaccgaagccggtagaatttactaccagggctgccgtcgtatgcttcatgaagtgcaggatgttcatgagcaactgtatgccttcaataacacccccatcgggacgctacgcattggctgttctagtactatggcacaaaatgttctcgccgggctgacagccaaaatgctgaaagaatacccaggtttgagcgtcaatctggttaccggaattccagcccccgacctgattgccgacggtctggatgtggtgatccgcgtcggcgcgttgcaggattccagcctgttttcccgccgtctgggcgcgatgccaatggtggtgtgcgccgcgaaaagctatctcacacaatacggcataccggaaaaacccgccgatttgagtagtcatagttggcttgaatacagcgtgcggcccgacaatgaatttgaactgatcgcaccggaagggatcagcactcgcctgatcccacaaggaagatttgtgactaatgatccgatgacgctggtgcgctggctgacggcgggtgccgggatcgcctacgtgccgctgatgtgggtgatcaacgagatcaatcgtggggagctggagatcctgctgccgcgttaccagagtgatccacgcccggtttatgcgttatataccgaaaaagataagctgccgctgaaggtacaggtcgtgatcaacagcctgacggattattttgttgaggtcggtaaattgtttcaggagatgcacgggcgcgggaaagagaagtaattcatattgtactgttacgttgtacaaacctgtgccaacgggttcccctcaccctaaccctcaccccaaaggggcgaggggaccgttcgtgcacgtagaaagattaattatccttctgaaaatagtgaaattattacgcagtaccgccaacagtcaggttatcgactttcaacgttggctggcccacgccaaccggcaaactttgcccttctttaccgcagacacccacgccgttatccagtttcaggtcgttgccaaccatgctaatctgctgcatggtttcgataccggaaccaatcaacgttgcgcctttcaccggcttcgttactttaccgttttcaatcagatatgcttcactagtggagaaaacgaatttgccggaggtgatatccacctgaccgccaccaaagttcggtgcatagataccgtactcaacggattcaataatttcctgcggggtgcttttacccggcagcatataggtgttggtcatacgcggcatgggcagatgggcgtaggattcacggcgaccgttgccagtcggcgtcatccccatcaaacgcgcgttgagtttatcctgcatgtagcctttcagaatgccgttctcaatcagcacgttgtactggcctggcgtaccttcgtcatcaatcgccacgctacctcggcgatcgaccatcgtgccatcatcaaccacggtacacagttcactagccaccagctccccgacctgtccactaaatacactagtgccacggcggttgaagtcgccttccagaccgtgaccaaccgcttcatgcaacagcacgcccggccaacctgcgccaagtactaccggcatggtgcccgctggtgcagcaacggcagaaagattgaccagcgccatacgcactgcttcttttgcccatgcatccgcacggacttcgccgtcgagatcggcaaggaagaattcataaccaaaacgaccgccgccgccactggcaccgcgttcgcgtttgccatcttcttcgacgagaacgctcacggaaagacgcaccagcggacggacatccgccgctagcgtgccgtcggtggccgcaaccaaaattaattcatagacaccactgaggctggcagtcacttcctgtacgcgcttgtccgcttcgcgggcaaccttatcgacgcgacgcaggatatccagcttctcttcacggctcatgctttgcagcggatctacgctggtatacaacgggctatgctctaccgcgcccagcgtctgtactttaccatcaccactatcacggacgatggtgcgcgccgcttgcgcactctgttccagcgccagcaggctgatttggtcagcgtaagcaaatccggttttttcaccgctgattgcacgcacaccaacgccctgatcgatgttgtaagaaccatctttaataatgcggtcttctaaaacccaggattcgtgatagctgctctgaaaatagagatcgccataatcaaggcgacgttcggccagttgaccgaggatcgcgaacaagtcctgatgtttcaggccgttcgccgctagcaattgttcacttaccaggttaagactcatcgtttttgctactcgttagttactgcagtagaggattttttacggctgccggatgcggcgtgaacgccctatccagcctacggttatgttccggtttgtaggcctgataagacgcacagcgtcgcatcaggcaacggctgtcggatgcggcgtaaacgccttatccgacctacggttatgttccgtttgtaggcctgataagacgcacagcgtcgcatcaggcaacggctgccggatgcggcgtaaacgccttatccgacctacggttatgttccgtttgtaggcctgataagacgcacagcgtcgcatcaggcaacggctgccggatgcggcgtgaacgccctatccgacctacggttatgttctggctcgttggcctttggcaacgattatcctatgagattggggcaattacgcgccctcgtcaaatcattgcgctttttctttacgcggttggcgcaacacttcgttgatttgcggatcgtccagcggaccgctaatgtgatagcgcaaaatggagactttgctccacagcggccccagcactttactggcggcaaacactgccgcgccaacaatggggttaaccgcaaaagccgcagccacgcccaccgtcgcagaaatctctggtgcgacaaccgcttccatattcaggtcgcgacgtaccagatttacgctccctttcatggcgatatccgcctccaggccatccaccagcgtgtcgtcggtgtgcataacgccgtctttaatccacgcggtgctgcgaatggagtcaaaatagaacccttcgccaaaagtgtctctgaaatcaaaacgcagcttacgcatcagggcatctacgctcaataagcgcagcaattgcccggcatgtccggtattgatttcggtaatttcgcctttacccagttgagtatgaatgatgccattcaacgtcgcttcatctggctgccagggtgctttgcgccagtgtaaatcgtaatccacattaaaactgctctggcgtatgggcgtcgtgacaccaaaaaattctgcggcggcatcaattttctgcccgcgcagttttcctttcaggctggtacgttcattccccggattattaacccattcaccatcggcagtaagccggctgaaaccagtatcaatcagtccattggtcagcgttaacgtatcgccagaaatggtgatatcactgtcaatgcgaccgaatttttgcccccagaaccagcactctgtgcatcgtatttgggcgtccggccagccacggaagttaatgcgctccgttgtcgggaaaggactactcggcgtactatcaccacgagttttcgccacgctcgggttgtaataaagatatttgatattcgccagccacggcgcgttattacgcatcgctagcgtggcgttgatttcacgcccttgcgcttcaaccagggtgccatttgccgtcggttggctaacaatactcaggttattccattgctgatttcccagactcaacataggcgtacgtaacgttatgtgttgtgggaaactcgctgcaccaccgacactctccgcagcgcctttctggaacagggccagccactcggcaccattcatcggcggcatattgagttcaacgccactttgttccggcaacggcgggagcgttttactgtctgccgcccaaatagcacgatcgagcgtcagcttttgaccgagcaaccagcggctattgaaatgattatccgcaccagcctgtccggttaattcaaagctgttgagattgccatcaaccttaacgtttaccgctagtggttcacccgcaggtttggctaacggactaggtaagtgactgctcacattctttagatcgccgttcagctctatgttataggtcgcaccagcatgataaggcagatcaatgcccactttaccatcccacgccacgctgccactcaatgcttcgttcaccgcttcaggcagaacgccggttttcgccggttgccagttaccgttgaggtttaccgctacctggtaggcttttgccccttctttggtggaaaaatccacgttcaacggctgattaaaccagcttgctgtcagtggttcactttgcagatcgctattgataaagctgaatttaccgctcaaatttttcagggtgctgtcgagtggtttgataaacagactgttattacgcagcgtcacttcacctttcgcggttaccagttcgccgttcagcgggatatcaagatgtaagcgagcattcacatcgccgtcgagctggagttcttgcagggtcgcacccagagaatctttcagcggtgtctcatcaaagtaagggccaacggctttacccggacctttaatgtcagcgtcaatcagcagtttttctttactgtagtcagggatcactgcggtaagattactcgcgcgcacgccgcccagattaacgccatcggttttcatccataaaccgtcgttaataaagtccagttcaatatcaaggttagttaatgcaggccagtccggctggaaggcaaacttcgcgttgcgcagcggcaccagcacttcaaactgaccttcgttgtgtttataggggaagagttgcggattgccaccataaaccagcgtcgcgttatccgcttcaccgccctgaatcgcgccacttaagtaatcaaccaggtctttacccatcaagttttccgggaaatagcgccaggcttgactaccatcatcggtactgatgccagccagaatacccagccagggttcatcgttagcaggttgcaggtaacgaaaaccgccgcgcgcatggacggctttggctttaacgtcaatattacgcccatccagctggaaacctttgttattgttcagccagcttatagttgcctggccgtcggcgatttctagtggcgcacggaataccgtttcgtaaggcatctttgcctgcttcatgctcgcggtaagcaaaccattttcaacgctgccggaaagcgtcccggagaagtgttccgcacccggtaataatttccattgcttccaggccagatcgctccagcttgcctgaaaacgggtcttgtctgccgcctgaagcgggatatccagcgccagagtgttaatcttgccgctcggttgtgtggagcgccaaacatcacccagtgcaggactaagtttcgcggccagcgggcgtatgccctccaggcctgccagctccagattactggcgcgaatccggagttcgtcactgcgtttattgtctttgccgccaacgtcctgttccggtatccaggccagcgtcaatgctccgctcggccagggtttgccgtccatcgtgatccgtgtatcgggaatagagaactgccagcccggattttcacgcgtaatatgcgcggtcagattatccacgctcagcgtatgcgtttgcttctcgcccaaccagctggcaccgccctgtttcagccagacgtcaccgccggttacatcgcctttgtcgatcgtcatccagccttcaagggagaactgtgccgtttccagcgcaatattgtcctgcatccatttaccgagccacggcttcaggtcgatgtcatccgcctggagccagacgcgaccattgcttaacaacccctcatcatcgcgcaaatccatgcgcacctgcatcacgccgtgctgtccggtaaggctggagaggcttaccaggccttccgcacggtgtcgacgtggatcgttcagccaggtgagttgtgggatcgccagctcggcgcgctgaccggatggcgtcaggaaactgacttcactgtcgcgaagatcgaaatggtcaaattgacgaagaaacagatcgctgatgtgactggcttccagactgtcatcactaccaccgctggtgataggagtgttggtgcgaaagcgcagctgccagaaagtgaggtcgcgaaactgccagcgcatatgtaacaggctctgccagacatccagcgccagagtaacgcgtttaacgctaaattcgccgccatcttttagttctgcacggatgtcgtgtgcttcaagcgtcgggccaaaattctgccagctggcactgagctgactggcttctaccggcatgccagtcgcggattctattttgttgaggatttccggacgccaggcgtcaagatgcggtaaagcaatacgcaggccgctaaccagcagggcagcgatcacaacgagcgcggctccagtaagcagtaaaatccccggcaatcgcctcacccgtcactccttgtctgctaaaaatgtgactcaaaaaccctttgccggatggcggcccagcatctgtttacatcattacgacgtcaaactgctcctggttatagagcggttcaatttgtactttaacctgtttgccaacgaaaatttccacttccgccaggctgtgactctcttcgcctttcaaggcttcagctactgccggagaagcatagaccaggaaacggtcggagtcgtaagcatggtggacacgaacaatctcgcgcatgatttcatagcataccgtttccacggttttcaccgttccgcgaccgtggcaggttgggcattcgttacacagtacgtgctcaatgctttcgcgggtgcgtttacgcgtcatctccaccagccccagcgcgctaaaaccattaacgctggttttcacccggtctttgctcaacgcctgctccaggctgtgcagcactcggcggcggtgatcttcattattcatatcgatgaaatcaataatgataatcccgcccagattacgcaaccgtaactggcgagcgatagcctgcgtcgcttcaatattggtattgaaaatggtgtcgtccagattgcgatgaccgacaaacgctccggtattgatgtccacggtggtcatcgcttcggtctggtcgataatgagataaccaccggatttcagttctactttgcgttccagcgctcgctggatttcgttttcgacatcaaagagatcgaaaatcggctggcgtcctgtgtaatgctccagcttgcttgtcatctcgggaatgtactcgctggtgaactcaagtaacgcttcgtaagtcaggcgactgtcaacgcgaatgcggtccagttcggcatcggcgaaatcacgcagaacacgctgcgccagcgccagttcgccgtacagctgataacgggtctgcgggcgttttttacgctccataactttggtccagacgcgtttcagataagcggcatcggaggccagttcagcctcgccaaccccttccgctgcggtacggatgataaacccgccctgctcgtcgcaatactctgcgaccacttttttcaggcgttcacgttcactttcgctttcaatacgttgggaaaccccaacgtgagaagcccctggcataaacaccagatagcgagaagggagcgtgatatcggtggtcaggcgcgcacctttagtgccaagcggatctttcaccacctgcaccatcagatcttgcccctgacgaaccagttcgctgatgtcgcgcaccgtgaattgcttttgttcttcacccgccacacattcggtgtgcggcatgatgtcggatgcatgaagaaacgcggctttatccagcccaatatctacaaaagccgcctgcatacccggaagtacacgacttacacgacccttgtagatattgcctactattccgcgtcgcgcctcacgttcaatatgaatttcctgcagaataccgccatcaatatacgccactcgcgtttcgctaggcgttacgtttactaacaattcagccgtcatgtttatcccttttctcacgcagtgcgttaaaattacttaataattcatacgtttcaaccagcggtaagccgactacggcgtgatagctgccatttatcttcctgacaaaacagccacccagcccctgaataccgtatgcacctgctttatctaacggttcatcgctggcgacatagcccgcgatgtcttcgtctgttaacgttctgaaagtcacatcggtgaccaccaggcaatcgagaatgtgctggctgtcggccaacgccactgctgtcatcacctgatgggtctgaccgcttaatttgcgcaacatctgcgccgcatgctctgcgtcgcgcggtttctccagcacttctccgttcaggataacgatagtatccgcacccagcaccgggagatccttcgccgtttgcgcgacacctgcccgtgctttctcgcgcgccagacgcacaacatactgctgcgcgctctcctgcggctgacgctgctcctcaatgcccgtaacaatacgttcaaaggtcacgccaagttgcgcaagtaactcctgacgacgcggagaaccggaagctaaatacagagaagtcatagaaacctttattgcactgcaaactgctgacggactttgcgcatcagcaagaaaatccacggccagagcaccccattgactacactactccagaacacttccggtctgaaagagacgttaatcactaaaaactctgcccagaaaacaataatatccaccaccaggctaagcaacatgacgaccagcgcctgctgccataatgcgaggttgcggaaaagctggtatttcagcgccaccaggtaagcaatgatgctcatcgccaatacgcgtacgccaagcgtgctgccgctgatcagatccagtatggcacccatcacaaaacctgtgcccacatttacgcgatgaggcaaggccaggatccaatacaacaagatgagtaacacccagtttggccggaaaacaatcaggttatccggccagggcatgatttgcagcaacagcgcaatgaggaaagagagccagattacccagcgtccctggctacgatagctcgccactattgccctcccggcgcacgttattgccctcccggcgcacgcgcaggcggttgagcaccactttgcggcggcgtagccctttgtggagagcgattagcagcaggctgtgtcggcgcagcaggcgcagtagctgcatttcctgtcgccggttgctgcggagtcggctgagcgatccccgttgccggttcaggtaactttggccccatcgcgtctgggctaggcaatacctgcggcatcatctgcatcagacgttcattagcaacacgatgcacctcttccggcgtcatcgggttagcgccgttacgatctgccccccacagcagcagcagataacgcaaacgttgcagccctgcagtcggacgcgcctgaatcacagtataagcgcgctgggtatcgagttttacggaagagacaaccgcgaccggatagccttccgggaaacgaccgcccagaccggaagtcaccagcacatcaccaacacgaatatccgtattcgccggcagatgctcaagctgcaaatcatccgtacaaccgttaccggctgcaattacgcggatatcgttgcgcagcacctggattggcagcgcgtgggtcgcatcacaaatcagcagcacgcgactggtcagtttagcgacggccaccacctgaccaacaacacctttgtcgctgatgaccggctggccttcataaacgccattaacgctacctttatcgataacaacttgatcgctataaggatcgttaaccgtggagataacctgagtcaccattttctgctcatcctgacgcagcggggaacccagcagctcgcgcagacgcgcgttctcctgtttgtattgtccaagcatcagcagttcactgtttttcagcaacagttcctgacgtaacgcccggttttcaagttctaattggtcacggctggccagcgtctggcttacgccatccagcaattcacgaggagcattggaaacaaagtagaaaggactgacggcggtatccatataagtacggatttgactgaacgtccccaggcggctgtcggcaataataatgccgagcgccaccagcaccgccagaataaggcgaatctgtaggctcgggccacggctaaaaattggcttcataagttatgcgtattctcgtatcagaccaggcagggtaaacagacacttcccctgcctgcatccgattactcttcgctgaacaggtcgccgccgtgcatgtcgatcatttccagcgctttgccgccaccgcgcgccacacaggtcagcgggtcttcagcaacaacgactggaatgccggtttcttccattaacaaacggtcaaggttacgcagcagtgcgccaccaccggtgagcaccatgccgcgctcggagatgtcggaagccagttccggcgggcactgttccagtgcaaccattaccgcgctcacaataccggtcagcggttcctgcagtgcttcgaggatttcattggagttcagggtaaaaccgcgtggaacaccttctgccaggttacggccacgaacttcgatttcacggacttcatcgcccggataagcgctaccgatttcgtgcttgatacgttctgcggtggcttcaccgatcagagaaccgtaattacgacgcacatagttgatgatagcttcgtcgaaacggtcaccaccaatgcgcacagaagaggagtaaaccacaccgttcaaggagataacagcaacttcagtggtaccaccaccgatatcaaccaccatagaaccggtcgcttcagaaaccggcaggccagcaccaattgcggcagccatcggttcttcaatcaggaagacttcacgggcaccagcgccctgcgcggattcacgaattgcgcggcgttcaacctgggtcgcgccaaccggcacacaaaccagaacgcgcgggcttggacgcataaagctgttgctgtgcacttgtttgatgaagtgctggagcattttttcagtcacgaagaagtcggcgataacgccgtctttcattgggcgaatggcagcaatattgcccggcgtacggcccagcatctgcttcgcgtcatgacctactgcagctacgcttttcggactaccggcacgatcctgacgaatggccaccacggaaggctcattcaatacgatgccttgtccttttacataaatgagggtattcgcagtacccaggtcaatggacaagtcattggaaaacatgccacgaaattttttcaacatactaagggataatcctgaaagctggggcggaaaagaaaatccgcttactttaccaaccacacgcagcagcgacaaggcgcaaaaatcatctgctacggtgaaaattagtgcagttcgtttcctttgttacaaatctctgcctgagtccagaaaggcttaatgcatcagcagcattcctcgcctgtttgcaaccgcgtaaggtcattcatctgcatatgtgctgcaacaatctggcgagcagacaagcacactcccatgagacgcagcgcgcattattctacgtgaaaacggattaaacggcaggttaaacgctgtatctttgactatattttttcacgttagtatcaagtggctgactggacgcgaaaaaatccccttgcccgcctgtaacaccgcgctgaatcagggtctgccactcgcttcggctacgcacgccggtggcgtaaacctgggtgctggtcccggagcaggcttccaccaggctttgaaccagcagctggttctccgttcgcttctcaatgtttctgaccagccccggatggagcttgagtaactcaacattaagttctttgatccaactggtacttaccagcgtcaaaccagcctggttgacggctacccgtacccctaaagcattcactaaacgaataacaggttgtaaacgactgatatgttgacctacatcggcctctgcaagttcaataattatgcgttttcgttgacttttttcacattgcattaacgtatcgcgcagccaacgctgaaaacgcgggcgaatcaggctctcaacggtaacctgaatcgccagattttcctctggccagtaacgcaatagtggaataagacggctgatttgcagacggtcatactcttcgcttaagccaaactgcaagaccatcggcatatgctccgcgctgctaacctcttcattaccatcgaagatgcggcacatgagttcgcgatgatgaacctgaccttcgcgagtaaccgccggtttttgataaaggcgcgggccgccgcgactgagcatttgctcgataagcgtacgccagcgaacattaccgcgtcctttttcaggcaagctgtcatcgtaaatagcccagctattgccgccctgcaatcccgcattacgcgtggcagactctgcatgttccattacctgctcggtatcctgaccactacgccaggcgcagataccaatgtggatcatatcgtcgcgatcgagcattttattgttcggcaaggtatcaacggctttgattaactgaccggcgatgctctctgcctcttttaacgtccggtgcggtaacagcgcagcaaaatcactgcggtggtaacgcgccagcagtgcgccagggtagcgcatcataaatgtgctcagcagattcgtcagagtgaagaactgttcttcaacctggctgtgcccccaggtatcgctcaacatattgaaatccggcagacgaatcatcatcacgatcccgtgggtacctactttctcctgatcttccagtaacgttgctaactgattatcgaaaaagagtcggttattgaggccggttttcacgtcctgggcggcataagagcggatcagcgtatcaagacggctgtgttgttcgcgtgcgttctgaatttcacgaagcagcgtatccagcgcactgctggttctgggcggccattcatagatggttcccaacacattagagccacgctcaccgtttaagatacgagtagcccgggtttccagcaattcttgcccggcaagttgccgttgtaaccagcgtaccgccaggaagagcataacaatgataaagccaatcgcccccgtgagcggcgcggtggtcatcaagctatggaaatagttgcccatcggatcctgataaaccagacgcaagctcatccccggatgctttatcaacggaacgctcagttcgcgaaacagatcgctggagccaactggacgataactaccatttctggccagggtataaacctgtttatcaccatggagcaggtctacacgaacgatatctgcgctcatcattaattcggtaatttgtggccttaatacgctgaagtcattgctcacaaggtgggtatcaatcgccgtcgccaccgcctgaacgcgatgactaaacttatactgaatggcgttgtagaaacttaggctacagcccagcaaagtcacaaaaattgttaacccggtgagcagcgtaacaaaggcgctaaatttcgtcgttaatctcatccttgtgttaactccgatagtgaggaagcgggcatactagcaaatcagatttatctcgcaatttattgcgcttcatcggctttgcttttccattagcgagtatagtcttcagaaattattttccaatccatcatgcacatgaggaccacttatgcaggcgttacttttagaacagcaggacggcaaaactctcgcaagtgtacagactctggacgaaagtcgcctgccggagggcgatgtcacggtcgatgttcactggagcagcctgaactataaagatgcgctggcgattaccggtaagggaaaaatcatccgtaattttccgatgattcctgggatcgattttgccggaactgtacgcaccagcgaagatccgcgttttcatgccggtcaggaggtgttactcactggctggggcgttggtgaaaaccactggggtgggctggcggagcaggcgcgagtgaaaggtgactggctggttgccatgccgcaagggctggacgcgcgtaaagcaatgattatcggtactgccggttttaccgccatgctgtgtgtgatggcgctggaagatgccggtgttcgcccgcaggacggggagattgtcgtgacgggtgccagtggtggcgtcggcagtaccgccgtggcgctgctgcataagttgggttatcaggtcgttgccgtttccggtcgcgaaagtacccatgaatatctgaaaagtttaggtgctagccgtgttctccctcgtgatgagtttgccgaatcccgtcctctggaaaaacaagtctgggctggggcaattgacaccgttggcgacaaagtgctggcaaaagtgctggcgcaaatgaattacggcggctgcgtggcggcctgtggtctggcgggtggttttactctgccaaccacggtcatgccatttattctgcgtaatgtccgtttgcaaggggtggatagtgtaatgacgccaccagaacgccgcgcacaagcctggcagcgactggtcgccgatttaccggaaagtttctatacccaggcggcaaaagagatatctctgagtgaggcaccgaactttgccgaggccatcattaataaccagatccagggtcgcacgctggtgaaggttaactaaccatttagcagggaataataagagagggaactcattttgaaatcattattcaatcggttaacgggaaaagcggttagccggacagctttcgtcgaacaccttggtcaggaagttatacaacatcatccaaactggaaagtcatgatttcgactgaccacaaattgatgcgcattgatactccactaaacagctattattgatacgcctccgtcgcctgttaggtttatgttgctttgcctgggcgacgctacgcttagccccttacttatttctggtaccatggggtgaataatctgattttgtttgactacaaattaatcactcgaacctatttaatgctgagcattgtcaatcggttaattttgcgtgctttagcattcacatctatccagacgatgcagtgaaaattgggtaatccccagcaaccgctgcgtaatgtcgtctatcttgtcgcgatcctggcatccctacattatttgtggtctgtgaagattatctcattgcagcccctcatcttcgcagggctggcttttcagcttttcaccttacgttataagaagttccgtcgatgatggcgctaatttcgtgaattgtgcggcttgttgcaaattacacggtgttgaaggttatttacatgttagctgttgattatcttccctgataagaccagtatttagctgccaattgctacgaaatcgttataatgtgcgacctcgtcctccctgacgcagtttttgcgctgcggaaaaggtgacattggcgcaacgaaggtatattttgttttttgccggaggatagcagcagatcgctgcacaatgtccgtcaagtctaacattgacactctggggcaaaatagaccggcgtcccggcctgctggaatttatcgctatgcatacagctgtcggggcatacgctttacagacggcggtgaaacgcctgtcacaatcacactaaacaaagagtacggaacccactcatggatattcgtaagattaaaaaactgatcgagctggttgaagaaagtggcatctccgaactggaaatttctgaaggcgaagagagtgtacgcattagccgtgcagctcctgccgcaagtttccctgtgatgcaacaagcttacgctgcaccaatgatgcagcagccagctcaatctaacgcagccgctccggcgaccgttccttccatggaagcgccagcagcagcggaaatcagtggtcacatcgtacgttccccgatggttggtactttctaccgcaccccaagcccggacgcaaaagcgttcatcgaagtgggtcagaaagtcaacgtgggcgataccctgtgcatcgttgaagccatgaaaatgatgaaccagatcgaagcggacaaatccggtaccgtgaaagcaattctggtcgaaagtggacaaccggtagaatttgacgagccgctggtcgtcatcgagtaacgaggcgaacatgctggataaaattgttattgccaaccgcggcgagattgcattgcgtattcttcgtgcctgtaaagaactgggcatcaagactgtcgctgtgcactccagcgcggatcgcgatctaaaacacgtattactggcagatgaaacggtctgtattggccctgctccgagtgtaaaaagttatctgaacatcccggcaatcatcagcgccgctgaaatcaccggcgcagtagcaatccatccgggttacggcttcctctccgagaacgccaactttgccgagcaggttgaacgctccggctttatcttcattggcccgaaagcagaaaccattcgcctgatgggcgacaaagtatccgcaatcgcggcgatgaaaaaagcgggcgtcccttgcgtaccgggttctgacggcccgctgggcgacgatatggataaaaaccgtgccattgctaaacgcattggttatccggtgattatcaaagcctccggcggcggcggcggtcgcggtatgcgcgtagtgcgcggcgacgctgaactggcacaatccatctccatgacccgtgcggaagcgaaagctgctttcagcaacgatatggtttacatggagaaatacctggaaaatcctcgccacgtcgagattcaggtactggctgacggtcagggcaacgctatctatctggcggaacgtgactgctccatgcaacgccgccaccagaaagtggtcgaagaagcgccagcaccgggcattaccccggaactgcgtcgctacatcggcgaacgttgcgctaaagcgtgtgttgatatcggctatcgcggtgcaggtactttcgagttcctgttcgaaaacggcgagttctatttcatcgaaatgaacacccgtattcaggtagaacacccggttacagaaatgatcaccggcgttgacctgatcaaagaacagctgcgtatcgctgccggtcaaccgctgagcatcaagcaagaagaagttcacgttcgcggccatgcggtggaatgtcgtatcaacgccgaagatccgaacaccttcctgccaagtccgggcaaaatcacccgtttccacgcacctggcggttttggcgtacgttgggagtctcatatctacgcgggctacaccgtaccgccgtactatgacagtatgatcggtaagctgatttgctacggtgaaaaccgtgacgtggcgattgcccgcatgaagaatgcgctgcaggagctgatcatcgacggtatcaaaaccaacgttgatctgcagatccgcatcatgaatgacgagaacttccagcatggtggcactaacatccactatctggagaaaaaactcggtcttcaggaaaaataagactgctaaagcgtcaaaaggccggattttccggccttttttattactggggatcgacaacccccataaggtacaatccccgctttcttcacccatcagggacaaaaaatggacactcgttttgttcaggcccataaagaggcgcgctgggcgctggggctgacccttttgtatctggcagtttggttagtagccgcttacttatctggcgttgcccccggttttaccggctttccgcgctggtttgagatggcctgcatcctgacgccgctgctgtttattggactgtgctgggcgatggtgaaatttatctatcgcgatatcccactggaggatgacgatgcagcttgaagtaattctaccgctggtcgcctatctggtggtggtgttcggtatcagcgtttatgcgatgcgtaaacggagcaccggcaccttccttaatgagtatttcctcggcagccgctctatgggcggtattgtgctggcgatgacgctcaccgcgacctatatcagtgccagtagctttatcggcgggccaggagctgcttataaatacgggctgggctgggtattgctggcgatgattcagcttcctgcagtctggcttagtctcggtattctcggcaagaagtttgcgattcttgcgcgccgctacaatgcagtgacgctgaacgatatgctgtttgcccgctaccagagtcgtcttctggtgtggctggcgagtttgagtttgctggttgcgttcgttggtgcgatgaccgtgcagtttatcggcggtgcgcgcctgctggaaaccgcggcgggtattccttatgaaaccgggctgctgatttttggtatcagcattgcgttatataccgcctttggtggctttcgcgccagcgtgctgaacgacaccatgcaagggcttgtgatgctgattggcaccgttgtgctgcttattggcgtagtacatgccgctggcggcttaagtaacgcagtacagaccttgcaaaccatcgatccgcaactggttacgccacaaggcgctgacgatattctgagccctgcctttatgacgagcttctgggtactggtgtgttttggcgtgattggcctgccgcatactgcggtgcgctgtatctcttataaagacagcaaagccgtacatcgggggatcatcatcggtacgattgtggtcgcaattctgatgttcggtatgcacctggccggagcgttaggtcgggcggtgatccccgatctcaccgtaccggacctggtgatcccaacgttaatggtaaaagtgctgccaccgtttgctgccgggatcttcctggctgcaccgatggctgcgatcatgagcacaattaacgcccaactgctgcaaagttccgctacgatcattaaagatctctatctgaatatccgtccggatcaaatgcaaaacgagacgcgtctgaagcggatgagcgcggtaattacgttagttctcggcgcgttgctgctgcttgccgcctggaagccgccagaaatgatcatctggctgaatttgttggccttcggtgggctggaagccgttttcctgtggccgctggtgctgggtctttactgggaacgcgccaacgccaaaggcgcgctaagtgcgatgatcgttggcggcgtgctgtatgccgtactcgcgacgctgaatattcagtacctgggcttccaccctatcgtgcccagcttactactaagtttgctggctttcctggtcggaaaccgtttcggtacatccgtcccgcaagctaccgttttgactactgataaataaagagttttgccatgccttggatccaactgaaactgaacaccaccggcgcgaacgcggaagatcttagcgatgcgctgatggaagcgggtgccgtttctatcacttttcaggatacccacgatacgccagtatttgaaccgctgccgggcgaaacgcgcctgtggggcgacaccgatgtgattggtctgttcgacgctgaaaccgatatgaacgacgtggtggcgattctggaaaaccatccgctgctcggcgcaggcttcgcgcataaaatcgaacaactagaagataaagactgggagcgcgaatggatggataatttccacccgatgcgctttggtgaacgactgtggatctgccctagctggcgtgatgtgccggacgaaaacgccgtcaacgtgatgttagatccagggctggcgtttggtacgggtacccatccaaccacctctctgtgcctgcaatggctcgacagcctcgatttaaccggtaaaacagtcatcgactttggctgtggttccggcattctggcgatcgcggcgctgaaactgggtgcagcaaaagccattggtattgatatcgatccgcaggcgattcaggccagccgcgataacgccgaacgtaatggcgtttctgaccgtctggaactctacttaccgaaagatcagccagaagaaatgaaagccgacgtggtggtcgctaacatccttgcaggcccattacgtgaactggcaccgttaatcagcgtcctgccggttagtggcggtttgctgggcctttccggtattctggcaagccaggcagagagcgtttgtgaagcttatgccgatagcttcgcactggacccggtcgtggaaaaagaagagtggtgccgtattaccggtcgtaagaattaaccttcgcatcgccgtagggtgacgcggggcgaagtgcgagcaagctcacaaaaggcacgtaaatttgccgattatttacgcaaatttgcgtgccaaaattttcattcataaagaaaaattgagaacttactcaaatttctttgagtgtaaattttagtcactattttctaatatgatgatttttatgagtaattatcgcaccacgctcattttaaatgcaattctttgatccatctcagaggattggtcaaagtttggcctttcatctcgtgcaaaaaatgcgtaatatacgccgccttgcagtcacagtatggtcatttcttaactcatgcgcatcggacaatatcagctcagaaatcgcctgatcgcagcgcccatggctggcattacagacagaccttttcggacgttgtgctacgagatgggagccggattgacagtatccgagatgatgtcttctaacccacaggtttgggaaagcgacaaatctcgtttacggatggtgcacattgatgaacccggtattcgcaccgtgcaaattgctggtagcgatccgaaagaaatggcagatgcagcacgtattaacgtggaaagcggtgcccagattattgatatcaatatgggttgcccggctaaaaaagtgaatcgcaagctcgcaggtagtgccctcttgcagtacccggatgtcgttaaaagcatccttaccgaggtcgtcaatgcagtggacgttcctgttaccctgaagattcgcaccggctgggcaccggaacaccgtaactgcgaagagattgcccaactggctgaagactgtggcattcaggctctgaccattcatggccgtacacgcgcctgtttgttcaatggagaagctgagtacgacagtattcgggcagttaagcagaaagtttccattccggttatcgcgaatggcgacattactgacccgcttaaagccagagctgtgctcgactatacaggggcggatgccctgatgataggccgcgcagctcagggaagaccctggatctttcgggaaatccagcattatctggacactggggagttgctgcccccgctgcctttggcagaggttaagcgcttgctttgcgcgcacgttcgggaactgcatgacttttatggtccggcaaaagggtaccgaattgcacgtaaacacgtttcctggtatctccaggaacacgctccaaatgaccagtttcggcgcacattcaacgccattgaggatgccagcgaacagctggaggcgttggaggcatacttcgaaaattttgcgtaaacagaaataaagagctgacagaactatgttcgaacaacgcgtaaattctgacgtactgaccgtttctaccgttaactctcaggatcaggtaacccaaaaacccctgcgtgacagcgttaaacaggcactgaagaactattttgctcaactgaatggtcaggatgtgaatgacctctatgagctggtactggctgaagtagaacagcccctgttggacatggtgatgcaatacacccgtggtaaccagacccgtgctgcgctgatgatgggcatcaaccgtggtacgctgcgtaaaaaattgaaaaaatacggcatgaactaattcaggttagctaaatgcttgattaaaaaggcgctactcggcatggggaagcgccttttttataggtgtcacaaagggagtgaccatgagaacaggatgtgaaccgacccggtttggtaatgaagctaagaccattattcacggtgatgcgcttgccgaacttaaaaagatccccgccgaaagtgtcgatctgatctttgccgacccaccatataacatcggtaaaaattttgatggtctgatcgaagcctggaaagaagatctgtttatcgactggctgtttgaagtgattgcagagtgccaccgcgttctgaaaaagcagggcagcatgtacatcatgaacagtacggaaaacatgccctttatcgatctccagtgccgcaagctttttaccatcaaaagtcgcatcgtctggagttatgacagttctggagtgcaggcgaaaaaacactacggctccatgtacgaacccatcctgatgatggtgaaagacgcaaagaactacacattcaacggtgatgctattctggtagaagccaaaaccggaagccagcgcgcgttgatcgattatcgcaaaaatcctccacagccttacaatcatcaaaaagtaccgggtaacgtttgggattttccgcgcgtgcgttatttgatggatgaatatgaaaaccacccgacgcaaaaaccggaagccttactgaaacgcattattctcgcctcttccaacccaggcgatatcgttctcgacccgtttgctggtagctttactaccggtgccgtagccatcgccagcggacgaaaattcattggtattgagatcaacagcgagtacatcaaaatggggcttcgacggctggatgtcgcgagccattactctgcggaagaactggcgaaagtgaaaaaaagaaagaccggcaacctgagtaaacgaagccggttaagcgaagttgaccccgatctcattacaaagtaaaggatgtgtaagcctggttttcagattattcatttcgtgtatatttcctgccagacttggttaaacatgcacaggctcaggtaatgattcgcaagtattggtggctcgtcgttttcgctgtcttcgtttttctgtttgatactttactgatgcagtggattgaactgctggcaacagaaacagacaaatgccgcaatatgaacagtgttaatccactaaaactggttaactgtgacgaactgaattttcaggacagaatgtgaatttacatgacacttaattcattcgtttgatgaattaatttcgttatgttttcatctggcatgaacattcttaatacgttatcgaccagagcgggggcttgtttataaagatcataacccgccatattcattaaccagttttgaacaattccgctgaaggcaccatcaataataatcatcacaacatctaaatcgaggttatttgctacacaaccttgttgctgacacgcctgcaatacttcgcggagagtctgcggattaaagcccatcttttcgcgtatcactccctcggccagcatctcatcattaaattcacatttgtgatataagattttcagcaacgcctgctggcggggaattttggcaatatattgcaagccgacaatcaatttttcacgcaattgttgaaacgggtcatgctctaatccagccgtcaagtgttcctggattaactcccgcaaactaggctgttgcaaccacatctcattaaacagttgagtcttgttttcgaagtgccagtagatagcgccacgcgtaacgttagcggcgtcggcaatgtcgttgagcgtcgtcttgcttacgccatgctgcgcaaactgggcgatggcagtttcaatcagttcttgccgggtcttcagagcttcggctttggttctttttgccatgattaattattcaggaaataaatatattcgacacagagtgagaaaatagcgaaggttaatctatcacctaatgtgtatttatacgagaggctaatattgagttgctataaatcgttaaataaataatatatattatttacctaagatacattcactacatcaatatatatttcaatttacgaggttttaattctgcctctttcaacccgcgtcaaaataaaacagtagaatattaatctttttttgtgtttatgtgccttgagatgcctgtattcataactattccttacatcgacgaatgataatttgtaggatagcgaactgtatttttctttctgcgagttaacgcgttgcctttttgggtaaataacgcgcttttggttttttgaggaatagtaatgacgaaacatgccaggtttttcctcctgccctcctttattctgatctccgcggctttaatcgccggttgtaacgataagggagaagagaaagctcacgtcggtgaaccgcaggttaccgttcatattgtaaaaacggccccgttagaagttaagactgaattaccaggccgcaccaatgcttatcgtatagccgaagttcgcccacaggttagcgggatcgtactgaatcgcaatttcactgaaggcagcgatgtgcaagcaggccagtccctgtaccagatcgatcccgcgacctatcaggcaaattatgacagcgcgaaaggcgaactggcgaaaagtgaagccgccgccgccatcgcgcatttgacggtaaaacgttacgttccgctcgtgggtacgaaatacatcagccagcaggagtacgaccaggccattgctgatgctcgtcaggccgatgccgccgtgattgccgcaaaagccacagtcgaaagcgctcgcatcaatcttgcttataccaaagtcactgcgccaattagcggacgtatcggcaaaagcactgtgaccgaaggcgctcttgtcactaatgggcaaacgactgaactggcgactgtccagcagctcgatcctatctacgttgatgtgacccaatccagcaacgattttatgaggctgaagcaatccgtagagcaaggaaatttgcataaggaaaacgccaccagcaacgtagagttggtcatggaaaacggtcaaacctatcccctgaaaggtacgctgcaattctccgatgtgaccgttgatgaaagcaccggctccataaccctacgtgctgtcttccctaacccgcaacatacgcttttgccgggtatgtttgtgcgtgcacggattgatgaaggcgtccaacctgacgccattcttatcccgcaacaaggcgttagccgcacaccgcgtggtgatgcaaccgtgctgattgttaacgataaaagtcaggttgaagcgcgccctgtcgttgccagtcaggcgattggcgataaatggttgattagtgaaggactgaaatctggcgatcaagtcattgtcagcggcctgcaaaaagcgcgtccgggagagcaggttaaagccactaccgatacccccgcagatactgcaagcaagtaaggtaatctgacatggcaaacttttttattcgacgaccgatatttgcatgggtgctggccattattctgatgatggcgggcgcactggcgatcctacaattgcccgtcgctcagtatccaacaattgcaccgcctgcggtttctgttagtgcaaactatccgggcgctgatgcgcagaccgtgcaggatacggtgacgcaggttatcgaacagaatatgaacggtatcgataacctgatgtatatgtcctccaccagcgattccgccggtagcgtgacaattacccttaccttccagtccgggaccgatcctgatatcgcgcaagtgcaggtgcagaacaaactccagctcgccacgccgttgctgccgcaggaggttcagcagcaggggatcagtgttgaaaagtccagtagcagctatttgatggtggcgggctttgtctctgataacccaggcaccacacaggacgatatcagcgactatgtggcctctaacgttaaagatacgcttagccgtctgaatggcgtcggtgacgtacagcttttcggcgcacagtatgcgatgcgtatctggctggatgccgatctgctaaacaaatataaactgacaccggttgatgtgattaaccagttgaaggtacagaacgatcagatcgctgccggacagttgggcggaacgccagcgttaccagggcaacaattgaacgccagcattattgctcagacgcggtttaaaaatccggaagaattcggcaaagtgaccctgcgcgtaaacagtgacggcagcgtggtacgcctgaaagatgtcgcacgggttgaacttggcggtgaaaactataacgttatcgctcgtatcaacggaaaaccggcggcgggcctggggattaagctggcaaccggcgcgaatgctctcgataccgcgaaagccattaaggcaaaactggcggaattacagccattcttcccgcagggaatgaaggttctctacccttatgacaccacgccattcgtccagctttctattcacgaagtggtaaaaacgctgttcgaagccattatgctggtgttcctggtgatgtatctgttcttgcagaatatgcgagcaacgctgatccccgccattgcggtacccgtggtgttgttagggacgtttgccatcctcgccgcttttggttactccatcaacacactaacgatgttcgggatggtgcttgccatcgggctgctcgtcgatgatgcgatagtggtggtggagaacgtcgagcgcgtgatgatggaggataagctcccgccaaaagaagcgacggaaaaaagcatgagccaaattcagggcgcactggtgggtatcgcgatggtgctgagtgcggtatttattccgatggcattcttcggcggttctactggggcaatttatcgccagttctctatcaccatcgttagcgcaatggcgctttctgttctggtggcattgattcttacccctgcgttatgtgcaacgctgcttaaacccgtctctgctgagcatcacgaaaataagggcggtttcttcggttggtttaataccaccttcgatcatagcgttaaccactacaccaacagcgtcggcaaaatcctcggatccacaggacgatatttactgatctatgcgctgattgttgcaggaatggtggtgttgtttttacgtcttccgtcttccttcttacctgaagaggatcagggtgtctttctgaccatgattcagttacccgctggcgcgacgcaagagcggacgcaaaaagtgttggatcaagttacggattactatctgaagaacgagaaagcgaacgttgaaagtgtctttacggttaacggctttagcttcagcggccaggcacaaaacgccggtatggccttcgtcagtctgaaaccgtgggaagagcgtaatggtgacgaaaacagtgcggaagcggtaatccatcgtgccaaaatggaattgggcaagatccgcgacggttttgtcattccattcaatatgccagccattgttgaactgggcacggcaacgggtttcgactttgagttaattgatcaggctgggctgggtcacgatgccctaacccaggcccgtaaccagttgcttggtatggcggcgcaacatcctgccagcttagtcagcgtgcgccctaatggcctggaagacaccgcgcagtttaaactggaagttgaccaggaaaaggcgcaggcattaggtgttagtctttctgacatcaatcagaccattagtacggcgctgggtgggacttacgttaacgacttcatcgaccgtggccgcgtgaaaaagttgtatgttcaggcggatgccaaattccgtatgctgccagaagatgtcgataaactttatgtccgcagcgccaacggcgaaatggtgccattcagcgcctttaccactagtcattgggtgtatggctctccgcgactggaacgctacaacggtctgccgagtatggagattcagggggaagccgcgccaggaaccagttccggcgatgccatggcgttgatggaaaaccttgcgagtaaattacctgcgggcattggttatgactggacgggtatgagctatcaggaacgcttaagcggaaaccaggctcccgctctggtagcaatttcctttgtggttgttttcctgtgccttgctgcactctatgaaagctggagtattcctgtcagcgttatgttggtagtgccgttagggattgtcggcgtgctgctggcggcgacactctttaatcaaaaaaatgacgtctactttatggtgggcttgctaacgacaattggcttgagcgccaaaaacgctattttgatcgttgagttcgctaaagatctcatggagaaagagggtaaaggtgttgttgaagcgacactgatggcagtacgtatgcgtctgcgtcctatcctgatgacctctctcgcctttattctcggcgtattaccgctagctatcagtaacggtgccggcagtggcgcgcagaacgctgtgggtatcggggtaatgggaggaatggtctctgcaacgttgctggcaatcttcttcgtaccggtgttctttgtggtgatccgccgttgctttaaaggataaatcagaaacataaaggcgctttcgggtgcctttattatttccagtgaaacccataaaaattaataagatattcttctgctcactctttaaaagctttctatagttcccgctcccttcactatttttacaattcacataatttgtcattattcattccgcaagatttataacctccggtgataaaatggcattcagctcgttaataagagagttaacttattaagcgttagcgtttattactgaggtaacaccatgaaaagattaattcctgtggcattgctcaccgcattgctggcgggctgtgctcacgatagcccctgcgttccggtttatgacgatcagggtcgtctggttcacaccaatacctgtatgaaaggcacgactcaggataactgggaaacggctggggctattgccggcggggcagctgctgttgctggcctgacgatggggatcatcgctctaagcaaataactgaacagggcgcggagttccgcgctctttttaacgatacagtatctctccataagataaaatattgctatattctgctgggtaattccctgctgatttagcatgttacatcgcgttatttcgctgctttcgaaataacgcatcaatttaattttcacacttcccaccagaaatatactcacgctaacaatcattattctgcttagtaaaacacgcgtaaatattttgcgccaaaatgtggcgcatgtttcattttcgcaccattgcggggcgctgtttttattatttcctgtctacactcagcttattgcgacgcgaaatcgtgcgcaaaagctggcactacttttgcttataagaggatggccacagacaggtaaaagacgtttcccaaacgtcctataacgataattttcgcctcacaggaagcattatgaaaaagatgatgatagccacactggctgccgccagcgtgctgcttgccgttgcaaatcaggcgctgctggcgcgacgcttgatgccgttcagaaaaaaggttttgtgcaatgcgggatcagtgatggattacctgggttctcttatgccgatgctgacggtaagtttagtggtattgatgttgatatttgtcgtggtgttgccgctgctgtatttggtgacgacacgaaagtgaaatataccccgctcactgcaaaagaacgcttcaccgctttacagagtggggaggtggatttgctctcccgtaatacgacctggactagttctcgcgatgccgggatgggaatggcatttaccggcgtcacttattacgacggcattggcttcctgacgcacgataaagcggggctaaaaagcgcgaaagaactggatggcgctaccgtctgtattcaggcgggtactgataccgaactcaacgtcgccgactacttcaaggcaaacaatatgaagtacacaccggtgactttcgatcgctctgacgaaagtgcgaaggcactggaatctggtcgctgcgatacgctggccagcgatcaaagtcaactgtatgccctgcgcatcaaattaagcaacccagctgaatggattgtcttaccggaagttatcagtaaagaaccgcttggtccggtagttcgtcgtggcgatgatgaatggttcagcattgtacgctggacgcttttcgccatgctgaatgctgaagagatgggcatcaattcccagaacgtcgatgaaaaagcggctaatccagcaacgcctgatatggcacatctgctgggtaaagaaggcgattacggcaaggatctgaagctggataataaatgggcctataacatcatcaaacaggtgggtaactacagcgaaatttttgagcgtaacgtaggtagtgaaagcccgctgaaaattaaacgtgggcaaaataatctctggaataacggcggtattcagtacgcaccgcccgtgcgttaagtcggtgtgaggtaacgagcgtcgctacggcggcgctctcttcagcgttatgctttccgaggtttctatgtctcatcgccgcagtaccgttaaaggcagtctctcttttgccaaccctacggttcgcgcctggttattccagatccttgccgttgttgctgttgtcggcattgttggttggttatttcacaacactgtaacgaatctcaataatcgtggcattactagtggttttgcctttctggatcgcggcgctggcttcggtattgtccagcatttgatcgattaccagcagggcgacacctacggacgcgtttttattgtcggcttactcaatacgctactggtttctgcattgtgtattgtgttcgcttctgttttgggcttctttatcggtctggcgagacttagcgataactggctgctacgaaagctttccacaatttatattgagatcttccgtaatattcccccgctgctgcaaatcttcttctggtactttgccgtgttgcgcaatttgcccggaccacgccaggctgtgagcgcgtttgatctggcctttttgagcaatcgtgggctttatattccgagtccgcagctgggagacggatttattgcgtttatcctggctgttgttatggctatagtcctttctgttgggctattccgctttaataaaacataccagataaagaccggacaactgcgccgcacctggccgatcgccgcagtgttgatcattggtttgcctttactggcgcaatggctttttggcgcagcactacactgggatgtcccagccctacgaggctttaacttccgcggcgggatggttttaattcctgaactggcagccttaacgctggcacttagcgtttatacatctgcatttatcgccgagattatccgcgctgggatccaggcagtgccttatggtcaacatgaagcggctcggagtctgggattacccaacccggttacgctacgccaggtcattattccccaggcattgcgggtgattattccaccgttaaccagccagtatctcaacatcgtcaaaaactcctctcttgccgccgctattggctatcccgatatggttagcctgtttgccggcaccgtgctgaatcagacggggcaagccatcgagacgatagccatgaccatgagcgtctatctgattatcagcctgactatcagcctgctgatgaatatctataaccgccgcatcgcgatcgttgaacgctaaggagtcatgatgacaaaagtattgctgtctcatcccccgcgcccggcgagccataacagtagccgcgcgatggtgtgggtgcgaaaaaatctgttctccagctggagcaatagcctgctgactattggctgcatatggttgatgtgggaactgatcccaccgttgctgaactgggcatttttgcaggctaactgggttggcagtacgcgtgccgactgcacaaaagccggtgcctgttgggtcttcatccacgaacgatttggtcagtttatgtatgggctttacccacacgaccaacgctggcgaattaacctcgcattactgattgggcttgtgagcatcgcaccaatgttctggaaaatactcccgcatcgcggtcgctatattgcggcctgggcggtgatttacccactgattgtctggtggctgatgtatggcggtttttttgctcttgagcgggttgaaacccggcaatggggcgggctgacgctaactttaattattgcaagtgttgggattgcgggggcgctaccgtgggggatcttactggcgttaggtcgccgctcccatatgccgattgtgcgtatcttaagcgtcatttttatcgaattctggcgcggcgtgccgctgattaccgttctgtttatgtctagcgtcatgctgccgttgtttatggcagaaggcaccagtatcgacaaattgatccgcgcgctggttggcgtgatcctgtttcagagtgcatatgttgcggaagtcgtgcgaggtggattacaggcgctgcctaaagggcaatatgaagcggcagagagcctggcgttgggttactggaaaactcaggggctggttattctgccacaggcgttgaagctggtaattcctgggctggtaaataccatcatcgcactcttcaaagataccagcctggtgatcattatcgggttgttcgatcttttcagtagcgttcagcaggcaaccgttgatcccgcctggttgggtatgagcacggaagggtatgttttcgccgcgctgatctactggatcttctgtttcagcatgagccgctatagccagtatctggaaaaacgttttaacaccgggcgtacaccgcattgaggacactatgagccaaattttactgcaacctgctaacgcgatgattacgctggaaaacgtcaataaatggtatggacaattccatgttttgaaaaatataaatttaaccgtgcaaccgggagaacggatcgttctgtgtggccctagtggttccggtaaaagcacaaccattcgttgtattaatcatctggaagaacatcaacagggacggatcgtggtagatggcatcgaacttaatgaagatatccgcaatattgagcgcgtcaggcaggaagtgggaatggtctttcagcatttcaatctcttccctcatctgaccgttttacagaactgtaccctggcaccgatttgggtacgcaagatgcctaagaaagaggctgaagatctggcggtgcattacctagagcgggtgagaattgccgaacatgcgcataagtttcccggacagattagtggtggtcagcagcaacgcgttgccattgcgcgtagcctgtgtatgaagccgaaaattatgttgtttgatgagccaacgagcgcgctcgatcctgagatggtgaaagaggtgctggatacgatgattgggctggcgcagagcggtatgacaatgttgtgtgtaacacatgagatggggtttgcacgaaccgtcgctgaccgggtaatttttatggatcgtggggaaatagtggagcaagctgcacctgatgaattttttgcgcatcctaaaagtgagcgtacgagggcatttttaagccaggtaatccattaattgaatgttagttcgaaaagcaaaaaggccatcctttcggatggcctttcgcttgatttgatgtctggcagtttatggcgggcgtcctgcccgccaccctccgggccgttgcttcgcaacgttcaaatccgctcccggcggatttgtcctactcgggagagtgttcaccgacaaacaacagataaaacaaaaggcccagtcttccgactgagccttttgttttatttgatgtctggcagttccctactctcgcatggggagaccccacactaccatcggcgctacggcgtttcacttctgagttcggcatggggtcaggtgggaccaccgcgctactgccgccagacaaattcttttctaatctgccgaactttaacctaaaaagtggtgctgatacccagagtcgaactggggacctcacccttaccaagggtgcgctctaccaactgagccatatcagcacgctaaatttgatgcctggcagttccctactctcgcatggggagaccccacactaccatcggcgctacggcgtttcacttctgagttcggcatggggtcaggtgggaccaccgcgctacggccgccaggcaaattctgttttatcagaccgcttctgcgttctgatttaatctgtatcaggctgaaaatcttctctcatccgccaaaacagcttcggcgttgtaaggttaagcctcacggttcattagtaccggttagctcaacgcatcgctgcgcttacacacccggcctatcaacgtcgtcgtcttcaacgttccttcaggacccttaaagggtcagggagaactcatctcggggcaagtttcgtgcttagatgctttcagcacttatctcttccgcatttagctaccgggcagtgccattggcatgacaacccgaacaccagtgatgcgtccactccggtcctctcgtactaggagcagcccccctcagttctccagcgcccacggcagatagggaccgaactgtctcacgacgttctaaacccagctcgcgtaccactttaaatggcgaacagccatacccttgggacctacttcagccccaggatgtgatgagccgacatcgaggtgccaaacaccgccgtcgatatgaactcttgggcggtatcagcctgttatccccggagtaccttttatccgttgagcgatggcccttccattcagaaccaccggatcactatgacctgctttcgcacctgctcgcgccgtcacgctcgcagtcaagctggcttatgccattgcactaacctcctgatgtccgaccaggattagccaaccttcgtgctcctccgttactctttaggaggagaccgccccagtcaaactacccaccagacactgtccgcaacccggattacgggtcaacgttagaacatcaaacattaaagggtggtatttcaaggtcggctccatgcagactggcgtccacacttcaaagcctcccacctatcctacacatcaaggctcaatgttcagtgtcaagctatagtaaaggttcacggggtctttccgtcttgccgcgggtacactgcatcttcacagcgagttcaatttcactgagtctcgggtggagacagcctggccatcattacgccattcgtgcaggtcggaacttacccgacaaggaatttcgctaccttaggaccgttatagttacggccgccgtttaccggggcttcgatcaagagcttcgcttgcgctaaccccatcaattaaccttccggcaccgggcaggcgtcacaccgtatacgtccactttcgtgtttgcacagtgctgtgtttttaataaacagttgcagccagctggtatcttcgactgatttcagctccacgagcaagtcgcttcacctacatatcagcgtgccttctcccgaagttacggcaccattttgcctagttccttcacccgagttctctcaagcgccttggtattctctacctgaccacctgtgtcggtttggggtacgatttgatgttacctgatgcttagaggcttttcctggaagcagggcatttgttgcttcagcaccgtagtgcctcgtcatcacgcctcagccttgattttccggatttgcctggaaaaccagcctacacgcttaaaccgggacaaccgtcgcccggccaacatagccttctccgtccccccttcgcagtaacaccaagtacaggaatattaacctgtttcccatcgactacgcctttcggcctcgccttaggggtcgactcaccctgccccgattaacgttggacaggaacccttggtcttccggcgagcgggcttttcacccgctttatcgttacttatgtcagcattcgcacttctgatacctccagcatgcctcacagcacaccttcgcaggcttacagaacgctcccctacccaacaacgcataagcgtcgctgccgcagcttcggtgcatggtttagccccgttacatcttccgcgcaggccgactcgaccagtgagctattacgctttctttaaatgatggctgcttctaagccaacatcctggctgtctgggccttcccacatcgtttcccacttaaccatgactttgggaccttagctggcggtctgggttgtttccctcttcacgacggacgttagcacccgccgtgtgtctcccgtgataacattctccggtattcgcagtttgcatcgggttggtaagtcgggatgacccccttgccgaaacagtgctctacccccggagatgaattcacgaggcgctacctaaatagctttcggggagaaccagctatctcccggtttgattggcctttcacccccagccacaagtcatccgctaatttttcaacattagtcggttcggtcctccagttagtgttacccaaccttcaacctgcccatggctagatcaccgggtttcgggtctataccctgcaacttaacgcccagttaagactcggtttcccttcggctcccctattcggttaaccttgctacagaatataagtcgctgacccattatacaaaaggtacgcagtcacacgcctaagcgtgctcccactgcttgtacgtacacggtttcaggttctttttcactcccctcgccggggttcttttcgcctttccctcacggtactggttcactatcggtcagtcaggagtatttagccttggaggatggtccccccatattcagacaggataccacgtgtcccgccctactcatcgagctcacagcatgtgcatttttgtgtacggggctgtcaccctgtatcgcgcgcctttccagacgcttccactaacacacacactgattcaggctctgggctgctccccgttcgctcgccgctactgggggaatctcggttgatttcttttcctcggggtacttagatgtttcagttcccccggttcgcctcattaacctatggattcagttaatgatagtgtgtcgaaacacactgggtttccccattcggaaatcgccggttataacggttcatatcaccttaccgacgcttatcgcagattagcacgtccttcatcgcctctgactgccagggcatccaccgtgtacgcttagtcgcttaacctcacaacccgaagatgtttcacttcagagttgcgaaaatttgagagactcacgaacaactttcgttgttcagtgtttcaattttcagcttgatccagatttttaaagagcaaaacttcgcagtgaacctttgcaggtacactctgaagtattttttatttaatcactacagagatggtggagctatgcgggatcgaaccgcagacctcctgcgtgcaaagcaggcgctctcccagctgagctatagccccataacatgtagttaaaacctcttcaaatttgccgtgcaaatttggtaggcctgagtggacttgaaccaccgacctcacccttatcaggggtgcgctctaaccacctgagctacaagcctgtagaggttttactgctcattttcatcagacaatctgtgtgagcactgcaaagtacgcttctttaaggtaaggaggtgatccaaccgcaggttcccctacggttaccttgttacgacttcaccccagtcatgaatcacaaagtggtaagcgccctcccgaaggttaagctacctacttcttttgcaacccactcccatggtgtgacgggcggtgtgtacaaggcccgggaacgtattcaccgtggcattctgatccacgattactagcgattccgacttcatggagtcgagttgcagactccaatccggactacgacgcactttatgaggtccgcttgctctcgcgaggtcgcttctctttgtatgcgccattgtagcacgtgtgtagccctggtcgtaagggccatgatgacttgacgtcatccccaccttcctccagtttatcactggcagtctcctttgagttcccggccggaccgctggcaacaaaggataagggttgcgctcgttgcgggacttaacccaacatttcacaacacgagctgacgacagccatgcagcacctgtctcacggttcccgaaggcacattctcatctctgaaaacttccgtggatgtcaagaccaggtaaggttcttcgcgttgcatcgaattaaaccacatgctccaccgcttgtgcgggcccccgtcaattcatttgagttttaaccttgcggccgtactccccaggcggtcgacttaacgcgttagctccggaagccacgcctcaagggcacaacctccaagtcgacatcgtttacggcgtggactaccagggtatctaatcctgtttgctccccacgctttcgcacctgagcgtcagtcttcgtccagggggccgccttcgccaccggtattcctccagatctctacgcatttcaccgctacacctggaattctacccccctctacgagactcaagcttgccagtatcagatgcagttcccaggttgagcccggggatttcacatctgacttaacaaaccgcctgcgtgcgctttacgcccagtaattccgattaacgcttgcaccctccgtattaccgcggctgctggcacggagttagccggtgcttcttctgcgggtaacgtcaatgagcaaaggtattaactttactcccttcctccccgctgaaagtactttacaacccgaaggccttcttcatacacgcggcatggctgcatcaggcttgcgcccattgtgcaatattccccactgctgcctcccgtaggagtctggaccgtgtctcagttccagtgtggctggtcatcctctcagaccagctagggatcgtcgccttggtgagccgttaccccaccaacaagctaatcccatctgggcacatccgatgacaagaggcccgagggtccccctctttggtcttgcgacgttatgcggtattagctaccgtttccagtagttatccccctccatcaggcagtttcccagacattactcacccgtccgccactcgtcagcgaaacagcaagctgtttcctgttaccgttcgacttgcatgtgttaggcctgccgccagcgttcaatctgagccatgatcaaactcttcaatttaaaagtttgatgctcaaagaattaaacttcgtaatgaattacgtgttcactcttgagacttggtattcatttttcgtcttgcgacgttaagaatccgtatcttcgagtgcccacacagattgtctgataaattgttaaagagcagttgcgacgcggctttcagctcactgtcgcgaggtggcgtatattacgctttcctctttcagagtcaaccctgaatttcaggatttttttctcttcgttgttccgaccatcctgtgaagtgtttcacgttgtcgtctcaacggaggcgcattatagggatcccaattttttgcacaagtatttttttgatctttttttctgtttgttgttttttcaccctttttgctgcaatcgcacacaaaacggtgcttttttgcatactaaaagacttgcacaaggccaataatgcccccaaagtcattagtaaatcatttattgctgaggtaagtatgtctgatgttttacgcccataccgcgatctttttccacaaatcggtcagcgcgtaatgatcgacgatagcagtgtcgtgattggtgacgttcgtctggctgatgatgtggggatctggccgctcgttgtgattcgtggagatgtacattatgtacagatcggagcacgcaccaatatccaggatggcagtatgttgcatgtcactcataaatccagctacaacccagatggcaacccattaaccattggcgaagatgtcactgttggtcacaaggtgatgctccacggctgcaccattggcaatcgagttttggttgggatgggcagtattttacttgatggcgcaatagtagaagatgatgtgatgattggtgcgggtagtctggtcccacaaaataaacggctggagagcggatatctgtatctcggtagccccgtcaaacagatccgcccgttaagtgatgaagagaaggctgggttacgctattccgcgaataattacgtgaaatggaaggacgaatatctggatcagggtaaccagacccagccttgatcatcttcactttgttcctgaattaagttttccgcttcttcttccaggtcccagcgatgctgacgaaaactcgctaaccactgttctggcgtatctccagtaaagcgatacgccagactctcgccagagatcgcgcatgtcagttgcataccattcacgagagcgggaaaacatacacattttttattctcgtcccactcttccctgtccggaaactggatggcctgattcacgcggacaattcctcctgcaattgctttataactggttctacgtcaggcagaacaccgtgccagagaagaaaggcatgagccgcctgtgccaccagcattcctaaaccatcagcattacgcttactgcctcgctgctcacaccatgccagaaaaggagtttttcctttctgatagaacatgtcatagcaataaatgcctggatgaatgaggctactcgggatcgccggaatatcaccactgatgccactggatgttgcattaataatgagatcaaactcatgaccttccagttcgtccatactcaacgcctgaatactgccagtgtgcgcaaacaatttagccaactcttccgcgcgggataccgtccgattagttattgtcaccgcacagtccagggaaaggagtggcagtagtacgccgcgagatgctccaccagcgccgataagcagaatacgtaaaccagggcggataaaagacagacgttccagatcgcttaacaagcctacaccatcggtattgtcacccagcaggcgtccatcttctaaccgcatgagggtattaacagcaccagccaacgctgcccgttcagtaagctcatccgctctggcaaaagcctcttctttaaaaggcaccgtcacattcgcacctttaccaccagcactaaagaaagcgttcagtgtgttgatgaaatcattgatgggtgccaacacgcgcccatagggatgttcaatattcagttgctgagcaaattgctgatgaatgaatgggcttttgctgtgggctatcggattaccaaaaacagcataggtttccattatgttacccctgtcgaaacagttcacccgtcagggcatcgcggatttcactaggatttaaacgcccccccgtttcaccaggcacaaccgggaacgccgcgccaaattgtgcgcgaacttcgtctactgttcgacaaggtggcaatccactcaagttggcactggtagaaaccagcggtttaccataagcctggcacaaagcaaccaccaacggatggtcggtgactcgtacagcaaggctatcaaagcggcccgtcaaccagcgcggtgttgtcgcaggcgcgggaaagacaaaggtgacaggacctggccagcgggaaaaaatggtttcacgctgcacgtcagtcaacatggtgtcatcaatatagggtttaagctgctcgtaatttgctgcgattaaaatcagccccttatcaaccggacgctgttttaactccaacagtcgcatcactgctgtttcgctatcaggatcgcacccaacaccgaaaacggcttccgttggataggcgatgacacgttcttcattgagaacatctatcgcagctgcgatagcgtctctttgcaggttattattcacgttattattccgcgctaaccggctttccacattgtttactggcacaaaagtgttttacaccctgcgcggttttcttttcgatgagtagcggataatgacactcagggcattctccagctatgggtttgaagttaatggcaaattgacactccgggtagcgatcacaagagtgaaatgttttgccataacgggagcggcgctggaccagatggcccgtccgacattgggggcatgtaattgctgtttcgtccggtttatcgataagttcggtatgttcgcattcagggtagttaatgcaaccaataaacataccaaagcgtccctggcgtaataccagatttgcgccacatgcagggcaaacctgcccctccagaactttgacgatatgtccatccgcactagatttcagaggacggacgtagtcacacgccggatactgactgcatccaagaaacggaccgtgtttcccggatcgaataaccagttcagccccgcactttgggcaggactcattattacgcaccgtgaacagtgcacttttcgccataacaacttatgctgaattaaagaaatgattaatgcagcataccttcattcacttcaaagagtaattcttccatttgctggtacgcattttcgcagcccggaatattgaacaacaccatcaggatcacccatttcagatcatccagttcgaactctgcgttatccagcgcgagcactcgctctatcaccatttcacgagtttcaaggttgagcacctgaatctgctcaaggaaaagcagaaacccacggcagctggcatccagtcgttcacactcttccggtgtataaatacgcatggagagaggatcgctggccagttgcatcggttctgccaacccttcctgataatcagcaagtttttccagccatagcagggcattgtagatatcttctcgctcaaaacctgcgtcggtaagatcctgttcaagtttgtcttgatccacacgcaactcagcttctgtgtgaatataggtttcaaacaaatacattagtacgtcgaacatggcatgccctcctcaatcggacatagccgccgggtacagctgcgatccatcctgctaactccagttcgagtagttgagtaactacctctggcacaggttggccggcacgttcagcgacgacgtcaacaggtgttacctcatctcctacgttagccaggagctcaggaaatggcaatgccacgtcttgctgatctggactataaaaactattttcaggggcgtctggcaaccagtgcaatccaaattgcaagttttccagaatttcttccggttccgtcacaagaatcgcaccttgttttattaaccagtgaggcccttcgcttcccggattccctattggacctggcaaggcaaaaacttctcgcccctgctcaagcgcacaacgtgctgtcaccaggctaccactacgcaaagccgcttccaccaccagtacacctttacttagaccactgataatgcgatttcttcgtgggaaattgtaagcaaggggtggaacatcgaggggaaattcgctgacgagagcgcccccctgttcaagcagactggcagccagtcgggcatgacggcggggatgaatggtattaagtccattccccaatacagcaatgctgacgccatttacctgtaaggctgctttatgcgctacaccatcgattccacgcgccagtccactcgtaattgtcactccacgcgtcgccagagtttcgcaaaataatcgtccccatcgctcgccataccaactatgcgcccgactccccactacggcaagctgaaaactatgcagcgcgtgcagttctccttcaacaaacagtgcgccggggtaatctgtcgtcgccagaagttgaggaggataaaattcgctgtccgcaggaattaaatgatggttgggttgctccaaccaacaaagactgctttcgatactctttcgtggaaaactaagaaagcgttgtgcctgccgcaatgtaagccctgtttgctgcaatacaaccgcatcaatatggctctgttttgccacccagtgagcgatacggaccatatcatcgccgtacaagctgctgatactcattaaacgcagccaaatttctgtatcgaccatccttatctccctgccataagcagccttagcaatctttgcgattggtcagtgatgctgtcaatcagagggggatttgtctagaatagaagaaataatctttctaactcctgaacacatctctggagatttatgagcgttttgcaagtgttacatattccggacgagcggcttcgcaaagttgctaaaccggtagaagaagtgaatgcagaaattcagcgtatcgtcgatgatatgttcgagacgatgtacgcagaagaaggtattggcctggcggcaacccaggttgatatccatcaacgtatcattgttattgatgttagcgaaaaccgtgacgaacggctagtgttaatcaatccagagcttttagaaaaaagcggcgaaacaggcattgaagaaggttgcctgagcatccctgaacaacgtgctttagtgccgcgcgcagagaaagttaaaattcgcgcccttgaccgcgacggtaaaccatttgaactggaagcagacggtctgttagccatctgtattcagcatgagatggatcacctggtcggcaaactgtttatggattatctgagtccgctgaaacaacaacgtattcgtcagaaagttgaaaaactggatcgtctgaaagcccgggcttaaggataagaactaacgtgagtgaaagtctacgtattatttttgcgggtacacctgactttgcagcgcgtcatctcgacgcgctgttgtcttctggtcataacgtcgttggcgtgttcacccagccagaccgaccggcaggacgcggtaaaaaactgatgcccagcccggttaaagttctggctgaggaaaaaggtctgcccgtttttcaacctgtttccctgcgtccacaagaaaaccagcaactggtcgccgaactgcaggctgatgttatggtcgtcgtcgcctatggtttaattctgccgaaagcagtgctggagatgccgcgtcttggctgtatcaacgttcatggtagtctgctgccacgctggcgcggtgctgcaccaatccaacgcagtctatgggcgggtgatgcagaaactggtgtgaccattatgcaaatggatgtcggtttagacaccggtgatatgctctataagctctcctgcccgattactgcagaagataccagtggtacgctgtacgacaagctggcagagcttggcccacaagggcttatcaccacgttgaaacaactggcagacggcacggcgaaaccagaagttcaggacgaaactcttgtcacttacgccgagaagttgagtaaagaagaagcgcgtattgactggagtcttagcgcagcacagcttgaacgctgcattcgcgctttcaatccatggccaatgagctggctggaaattgaaggacagccggttaaagtctggaaagcaagcgtcattgatacggcaaccaacgctgcaccaggaacgatccttgaagccaacaaacaaggcattcaggttgcgactggtgatggcatcctgaacctgctcagcttacaacctgcgggtaagaaagcgatgagcgcgcaagacctcctgaactctcgtcgggaatggtttgttccgggcaaccgtctggtctgatagtccactcttctaagcccggtcttgccgggcgtttttatacttatgaaaaaacaacgtaatttacgtagcatggcggcccaggccgttgaacaagtcgtcgagcaagggcaaagtttaagcaacattctgccaccgctccagcaaaaagtttccgataaagacaaagcacttcttcaagagttgtgctttggcgtactgcgtacgcttagccagttagactggctgattaataagttaatggcccgtccgatgaccggcaaacagcggaccgtgcattacctgattatggttggtttgtatcaactgctttatacccgcattccacctcatgctgcgctggctgaaacggttgaaggcgctatcgcaattaagcgtccgcaacttaaagggttgataaacggtgtattacgccagttccagcgtcagcaagaagagttattagccgagtttaatgccagtgatgcacgttatctgcatccttcctggttgctgaagcgtctgcaaaaagcgtatccagagcagtggcaatccatcgtcgaagccaataaccagcgtccgccaatgtggctgcgtattaatcgtacgcatcattcccgcgacagctggcttgcattgctggatgaagcaggaatgaaaggtttcccgcatgcggattaccctgatgctgtacgtctggaaacacctgcacctgttcatgcgctacctggttttgaagacggatgggttaccgttcaggatgcaagtgcacaaggttgcatgacctggcttgcgccacaaaacggtgaacacattttggatctttgtgccgcccccggcggtaaaacaacgcatatccttgaggtggcaccagaagcgcaggttgttgcggttgatatcgacgaacagcgcctctctcgggtttacgacaatttaaaacgccttggtatgaaggcgaccgtgaaacaaggtgatggccgttacccttctcaatggtgtggcgagcaacagtttgatcgcattttattagatgcgccttgtagtgcaaccggtgtgattcgtcgccatccagatattaaatggttacgtcgcgatcgcgatatcccggaactcgcgcaattgcagtctgaaattctcgacgccatttggccgcatttaaaaaccggtggaactctggtctatgccacctgtagcgtgttaccggaagagaatagcctgcagattaaagcctttttgcaacgtaccgctgatgccgaactttgcgaaacaggaacaccagagcaaccgggtaaacaaaatctacctggtgccgaagagggcgacggcttcttttacgctaagctaatcaaaaagtgatgagataacgggtcgcgactgatgaaaattatcattctgggtgccggccaggttggcggcacactggcggaaaacctggttggcgagaacaacgatattactgttgtcgataccaacggtgagcgtctgcggaccttacaggataaatttgacctgcgggtcgtgcaggggcatggctctcatccacgcgtattgcgggaggcaggtgccgacgacgccgatatgctggttgctgtaaccagtagtgatgaaaccaatatggttgcctgccaggtagcctacagtcttttcaacacccctaatcgcatcgctcgtatccgcagtccagactacgtgcgcgatgccgataagctatttcatagtgatgctgtgccgattgatcatctgatcgcaccagagcagttggttatcgataatatttaccgactgattgagtatcccggcgcattgcaggtggtgaacttcgctgagggtaaagtcagcctggctgtggttaaagcctattatggcggcccgctgattggtaatgcacttagcaccatgcgcgaacatatgccacatatcgatactcgtgtggcagcaattttccgccacgatcgccccattcgtccgcaaggtagcaccattgttgaagctggtgatgaagtgttctttattgccgctagtcagcatatccgcgcggtgatgagtgaattacagcgactggaaaaaccgtataagcggatcatgctggttggtggcggtaatatcggtgcagggctggcgcgtcgtctggaaaaagattacagcgttaaactcatcgaacgtaatcagcagcgcgctgccgaactggcggaaaagttacagaatacgatcgtcttttttggtgatgcgagcgatcaagaactactggccgaagaacatatcgatcaagttgatctgtttattgccgtcaccaacgatgacgaggccaatatcatgtccgccatgcttgccaaacgtatgggtgcgaaaaaggtgatggtattgatccagcgtcgcgcttatgtggatctggttcaggggagcgttatcgatattgcgattagtccacaacaagcaactatttctgcgttgcttagccatgtgcgaaaagcagatattgttggtgtttccagtttgcgccgcggcgtagcagaagctattgaagccgttgctcacggtgatgaaagcaccagtcgcgttgtcggcagagtcattgacgaaatcaagctaccgccaggaacgattattggagcggtggtacgtggaaacgacgtgatgattgccaatgacaatctgcgcattgagcaaggcgatcacgtaattatgttcctcacagataaaaagtttattaccgacgtcgaaagactcttccagccaagccctttcttcttgtaattaataaggcgtctaatgacgccttattatttccctttgattatcaaggattaattaaattcattcctggcaggaaaatggcttaacatttgttagacttatggttgtcggcttcatagggagaataacatgagcattattaaagaatttcgcgaatttgcgatgcgcgggaacgtggtggatttggcggtgggtgtcattatcggtgcggcattcgggaagattgtctctagtctggttgccgatatcatcatgcctcctctgggcttattaattggcgggatcgattttaaacagtttgctgtcacgctacgcgatgcgcagggggatatccctgctgttgtgatgcattacggtgtcttcattcaaaacgtctttgattttctgattgtggcctttgccatctttatggcgattaagctaatcaacaaactgaatcggaaaaaagaagaaccagcagccgcacctgcaccaactaaagaagaagtattactgacagaaattcgtgatttgctgaaagagcagaataaccgctcttaacaagcgccactaagcagaagaccagtggtaaaaaagtgatttactttcttgccactggcctcccagttcccccgattgccatgttttccttttcgcatgtaactgcctttccccttcttatttttctctacgcgctgtcggaataagggatcatgtagtaatgcttctatcgcattatcctttatctgccctttagtatgctgatatcgactcataaaaactccagttggttatttaacggcgcgagtgtaatcctgccagtgcaaaaaatcaacaaccactcttaacgccactcgccccttgttcaagagcttcaagaatgctacaataaacactgctatgagcagtcccacaacaggcatcgttaaggcgttgcaaggaacgctgcatactctgcaactcggctatccgtgcttcgacttcctgcaatctttcctgcacaatgcctttactctcctgacaggtatggtgttcaggatcgatgcggatgctcagcaactcgcggatgctctccagactgaaacctagttgtctggcatggcggataaatttcaatcgctggagatcgctttcggtatataggcgaaacccaccttcagtacgcacttcatgctccatcatctgctgtttttcgtaataacgaatcgtgtcgggtgttacttccgccatttttgccagctcaccaatgcgatacatacatactccattagttatcgttgattttgtccaacaacttgtcagcataatcgccgcgtaaaaaatcggtactcaatccagcttgtcgcagcttcaattccagtaaactcaatcgacggctaacctcttgatattgcggatcatcgtgacggatacctttgagaatatccagaagctgaattgcttctctccgttgctcaagttctggcggtaagcaaccggcattcttcagcaagcgataccccgcacgtaattccggtggcacgtgagaatcatcatccagtatcaatggttcgccgctacctgccaggttatcaaactcacctttcgcttgcgcttctgctatatggcgctctgcccactggtcaagtaaccacataaatactccaggggatgaacaaaaagagtacagctattgtagataagtggggatactacgggtataaaaaaacccgccggggcgggtttttttacgttgcttcagattactctgcagcagcttctgctttctcactacgatcaaccagctcgatgtaagccatcggcgcgttgtcgcctgcacggaagccacacttcagaatacgagtgtaaccaccggcacggctcgcgaaacgcgggcccagttcgttaaacagttttgccacgatctcgttatcacgagtacgggtgaatgccagacgacgattagcaacgctatcagtcttggcaagagtaatcagcggctcaactacgcggcgcagctctttcgctttaggcagagtcgtcttgatgatttcatgacgaaccagactacctgccatattgcggaacatagcctggcgatggctgctgttgcggttcagttgacgaccactcttacgatggcgcatgaccttatccttctcagtaaaaccttaacctgtgattcggttactcgtcagcgatgcttgccggtggccagttttccaggcgcatgcccagagacagtccacgggaagccagcacgtctttaatctcagtaagagattttttaccaaggttaggcgttttaaggagctcaacctcggtacgctgtaccagatcaccgatatagtggatagcttctgctttaaggcagttagcagagcggacagtcaattccagatcgtcaacagggcgcagcaggatcggatcgaactctggtttctcttctttcacttcaggctgacgtacatcacgtaagtcaacgaaagcttccagttgttcagccagaatggttgccgcacgacgaatcgcctcttcaggatcgattgtgccgttggtttccatttcgatgaccagcttgtccaggtcggtacgctgttctacacgcgctgcttcaacattgtaggcaatacgctccacagggctgtagcatgcgtcgaccagcagacggccgattgggcgctcatcttcttcgctatgaattcgggtagaagccggcacataaccacgaccgcgctgaactttgatacgcatgctaatagacgcgttctcatcggtcaggtggcagatcacgtgctgcggcttgacgatttcgacatcaccgtcgtgggtgatatcggctgcagtcacagggccaatgccagatttattcaaggtaagaataacttcatctttgccctgaactctcaccgccagccctttcaggttgagcaggatttccaggatatcttcctgaacgccttctttggtgctgtactcatgtagtacaccatcaatctcaacctcggtcaccgcgcaacccggcatgctactgagcagaatacggcgcagtgcgttacccagagtatggccaaagccacgctctaaaggctcaagggtcaccttggcgtgcgtgctactcacttgctcgatatcaaccaggcgcggttttagaaactctgtcacagaaccctgcattgtgtcctctctttggtactaagctttacttggagtaaagctcgacgatcaggtgttcgttaatgtccgcagacagatcagaacgctccggcttacgcttaaacgtaccttccatcttgccagcatcaacttccagccaggttggcttttcacgctgctcagccagctccagagcggctttcacgcgagactgcttcttcgctttctcacgaatgcttacaacgtcattcggactaacctgataagaagcgatgttaacaacacgaccgtttaccataattgctttatggctaaccagctgacgtgcttctgcacgagtggcaccgaagcccatacggtatacaacgttgtccagacgaccttccagcagagccaacaggttttcaccggtgttgcctttcagacgtgctgcttctttgtagtagttacggaactgacgctccagcacaccatagatacggcgaactttttgcttttcacgcaactgcacaccatagtcagacagacgcggtttacgcgcaccgtgctggccaggagcttgttcaattttacacttggtatcgatcgcgcgaacgccagacttaaggaataagtcggtgccctcacgacggctcagcttgagcttaggacccaaatatcttgccattttctttctccaacaaacctggaaaacgaggcgttatacgcgacgttttttcggcggacgacaaccgttatgagggatcggagtcacatcagtaatgttagtgatgcggaaacctgcggcgttcagagcacgaatagtagattcgcggcctggacccggacctttaaccataacttccagattcttgatgccgtattctttcacggcgtcagcgcaacgctctgctgcaacctgagctgcaaacggagtggatttgcgagaaccacggaaaccggaaccaccggctgttgcccaacccaacgcgttaccctgacgatcagtgatagtcacgatggtgttgttgaaagaagcatggatatgagccacgccgtcagagacttgttttcttacacgtttacgtgcacgaattggtgcctttgccattattcaatcaccccgattatttcttgatcggtttgcgcggacccttacgggtacgtgcgttggtcttggtacgctgaccgcgaaccgggagaccacgacgatgacgcaaaccgcgatagcaaccaagatccatcaggcgcttgatgctcatgctgatttcacggcgcagatcaccttcaacgacaaatttggcaacttcgtcacgcagcgtgtcgatttgtccttcagacagctcactgatcttaacatcttcagcgatacccgctgcagccaggatggctttagaacgggtcttgccgacgccataaatgctagttaatgcgattacggcatgcttatgatcaggaatgttaatgcctgctatacgggccactatgcactcctactatttaatatgtacgttccatgctgaaaagcccgttttcaggatactcaaatggaaacgcacagacatacaaaagattggctggctaatctagccagctcaacccaactttgcaagaaaaatatgcgaaaaaatcagccttggcgctgtttatgcttcggctcggcactgcaaatcacacggatgacaccatcacgcttaacgattttgcagttacggcataatttcttgacggaagcacgaactttcatttttactctccgtaacttctcgggcgaccaattatcggccgtagcctttcaggttcgccttcttcaatgcagactcatactgactggacatcatcagagtttgcacttgagccataaagtccataatcacgacaacaacgataagcagactggtcccaccgaagtagaacggtactttcattgcatcacgcatgaactccgggatcaggcagataaaggtaatatacagcgcaccaaccagggtcaggcgggtcattactttatcgatatacttcgccgtttgctctcccggacgaattcctggtacaaatgcaccggacttcttcaggttatctgctgtttcacgcgggttgaaaaccaacgccgtgtagaagaaacagaagaagatgattgcagacgcatagagtaacacataaagcggttgcccaggctgcaaatacaggctaattgttgtcagccagttccaaccagtaccgcccccgaaccaactcgcgatggtcgccgggaacagaataatactggaagcgaagattgccgggattacccccgccatattcactttcagcggtaaatgtgtgctctgtgcagcatagacacgacgaccttgctgacgtttcgcgtagtttaccacaatgcggcgttgaccacgctcaacaaatacaacaaagaacgtcactgcaaatactaatactgcaaccaacagcaacacgaggaagtgcaggtcgccttgacgcgcttgctcgatagtatgggcaatggctggcgggagtcccgcgacaataccggcgaagataatgatactaataccgttgccgatacctcgttcagtaatctgttcgcccaaccacatcaggaacatggttcctgtgaccagacttacaacagcggtgaagtagaatgcaaagcccgggttaatcaccaggccttgcataccaggcatattcggcagaccggtagcaataccgatgctctggaatattgccagcaccagagtaccgtagcgggtgtactggctgatcttacgacgaccagactccccttctttcttaatttctgccaacgttgggtgaaccaccgtcagcagctggataatgatgctcgcgctaatatacggcatgatccccagagcaaagatagaagcacggctgagagcaccaccagagaacatgttaaacatctcaatgatggtgcctcgctgttgctcaagcagtttggcaagtacagcggcatcaataccagggatcggaataaaagagccaatacggaacacaatcagcgcaccgataacaaacagcagtctgcgtttcagctcgcctaagccacctttggcactttgaaaatctaatcccggttgtttagccatctgctacttattcctcgattttaccgccagcagcttcgatagcagcacgagcgcctttagtaacacgcaggccacgaacagttaccggagtcgttacttcgccagccaggatcactttcgcgaactcgatctggataccgataatgttagccgctttcagcgtgttcaggtctactacaccgccttctactttagccaggtcagacagacgaatttcggctgtaatcgctgctttacgagaagtgaagccgaatttcggcagacgacggtacagaggcatctgaccaccctcgaaaccgcgacgtacgccaccgccagaacgagacttctgacctttgtgaccacgaccaccggttttaccgaggccagaaccgataccacgacccaggcgtttacccgcctttttggagccttcggccggagacagagtatttaaacgcatctcttactcctcaactttaaccatgaaggaaaccgcgttgatcataccgcgaatagcaggagtatcctcgcgctctacggtgtgaccaatacgacgcagacccaggccaagcagcgttgccttgtgtttcggcagacgaccgattgcactgcgggtttgagtaattttaatagtctttgccatggtttatttccccagaatttcttcaacggatttaccacgcttggcagcgaccatttctggagaattcatattttccaggccatcaatagttgcacgaaccacgttgatcgggttggtggaaccataggctttagccagaacgttatgaaccccagcgacttccagaacggcgcgcattgcaccaccggcgatgataccggtaccttcggaagccggctgcatgaatacgcgagaacccgtgtgaacacctttaacagggtgttgcagagtgccgttattcagcgcgacgttaatcatattgcgacgggctttttccatcgctttctggatcgctgctggaacttcacgcgctttaccgtaaccaaaaccaacgcgaccgttaccatcgccaactacagtcagagctgtgaaggagaaaatacgaccacctttaacggttttagatacgcggtttaccgcgatcagcttttcctgcagttcgccagcttgtttttcgatgtgagccatcttacacctctaccttagaactgaaggccagcttcacgggcagcatctgccagtgcctggacacgaccatgatattggaacccggaacggtcaaaggatacatctttgatgcctttttccagagcgcgttcagcgacagctttacccacagctgcagccgcgtctttgttaccggtgtacttcagttgttcagcgatagctttttctacagtagaagcagctaccagaacttcagaaccgttcggtgcaattacctgtgcgtaaatgtgacgcggggtacgatgtaccaccaggcgagttgcgcccagctcctggagcttgcggcgtgcgcgggtcgcacgacggatacgagcagatttcttatccatagtgttaccttacttcttcttagcctctttggtacgcacgacttcgtcggcgtaacgaacacccttgcctttataaggctcaggacgacggtaggcgcgcagatccgctgcaacctggccgatcacctgcttatcagcgcctttcagcacgatttcagtctgagtcggacattcagcagtgatacccgcaggcagctgatggtcaacaggatgagagaaacccagagacaggttaatcacattgcctttaaccgctgcacggtaacctacaccaaccagctgcagcttcttagtgaagccttcggtaacaccgataaccatactgttcagcagggcacgcgcggtaccagcctgtgcccaaccgtctgcgtaaccatcacgcggaccgaaggtcagggtattatctgcatgtttaacttcaacagcatcgttgagagtacgagtcagctcgccgtttttacctttgatcgtaataacctgaccgttgatttttacgtcaacgccggcaggaacaacgaccggtgctttagcaacacgagacattttttcctccgattaggctacgtagcagataatttcgccaccaagaccagcctggcgcgctgcacgatcagtcataacacctttagaggtagaaacaactgcgatacccagacccgccataactttcggcagctcatctttacgtttatagatgcgcagacctgggcggctgacacgctgaatgctttctacaacagctttgccctggaaatacttcagagtaagttccagttcaggcttggtgtcgccttcaactttaaaatcttcaataaaaccttcttccttcagcacgttggcgattgccactttcagcttggaggaaggcatggtgaccgcagctttgttcgcggcctgaccgttacggatacgggtcagcatatccgcgatcggatcttgcatgctcatctgtctttactcccgtgattcaattggtgacaattaccagctagcctttttcagacccgggatttcaccgcgcatagcggcttcacggaccttaatacggctcaacccgaacttccgcaggaaaccatgcggacgacctgtttgacggcagcggttacgctgacgagacgggctggaatcacgcggcagagtctgcagcttgagaacagcgttccaacgatcttcgtcggaagcgttcacatcagagatgatcgctttcagttcagcgcgtttcgcgaagtatttatcagctaaagctacgcgttttacttcgcgtgctttcatactttgcttagccatttagtaaccctaccttacttgcggaacgggaagtcaaaggcagccagcagagcgcggccttcttcgtcagatttcgcagtagtggtaatggtaatatccaaaccacgaacgcggtcgactttatcgtagtcgatttctgggaagatgatctgctcacggacacccatgctgtagttaccacgaccgtcgaaagacttagcggacaggccacggaagtcacggatacgaggtacagcaatagtgatcaggcgctcaaagaactcccacatgcgttcgccacgcagagttactttacagccgatcggatagccctgacggattttgaagcctgcaacagatttgcgtgctttggtgatcagcggtttttgaccggagattgctgccaggtctgctgctgcgttatccagcagttttttgtcagcgatcgcttcaccaacacccatgttcagggtgatcttctcgacccgagggacttgcatgacagaattgtagttaaactcagtcatgagttttttaactacttcgtctttgtagtaatcatgcagtttcgccatcgtactactccaaattacttgatagtttcgctgttagacttgaagaaacggacttttttaccgtcttcgaatctaaagcctacacggtcagccttgccggttgccgcattgaagattgctacgttggaaacctgaatagcggcttctttttcaacgatgccacccggttggttcagggccggaaccggcttctgatgtttcttaaccaggttgataccttcaacaatgaccttgccggaagacaggacattcttaactttaccgcgtttacctttatctttaccggttaacacgataacttcgtcatcacgacggattttcgctgccatgattcgctccttagagtacttctggtgccagagagataattttcatgaacttctcactacgaagctcacgagttaccggcccaaaaatacgcgtaccgataggctgctcgctgttgttgttcagaagaacacaagcattaccatcgaagcgaatgacagaaccgtccgggcgacgaacacccttcttggtgcgcaccactaccgccttcagcacatcaccttttttgaccttaccacgcggaattgcttctttgatggtgatcttgatgatgtcgcctacgcctgcgtagcgacggtggctgccacccagaaccttgatacacattacgcgacgtgcaccggagttgtcggcgacgttcagcatagtctgttcttggatcattttagtgctccgctaatgtcaactactactgagacccgaaaatcaggtcgttaaaaatccccatatcgagggcgcggcattataacaccgcttcaaggatatgggtagaaaaaataaacggctcatttctgagccgtttattcgtattgagagagtgtactgtattacagaaccgctttctctacaacgcgaaccagcgtccaggatttagtcttggacagcggacggcattcgcggatttcaaccacgtcaccgataccgcattcgttgttctcgtcatgtacgtgcagtttggtcgtacgcttgatgaatttaccgtagatcgggtgtttcacaaaacgttcgatagcaacaacaatggatttctccattttgtcgctaacaacgcgaccttgcagagtacggattttatcggtcattacgcacccgccttctcgttcagtaaagtcttaacgcgtgcgacatcgcgacgcacttgcttcaacaggtgagactgttgcagctggccacttgcagcctgcatacgcaggttgaactgctcacgcagcaggttcagcagctcggtgttcagctcttcaacgctcttctcacgcagctcttttgctttcattacatcaccgtcttagttacaaaggtggttttaatcggcagtttcgctgctgccagcttgaatgcttcacgggccagctcttccggaacaccgtccatttcatacaggactttacccggctgaatcaaggcaacccaatactccacgttacctttacctttacccatacgcactgccagcggcttttcagtgatcggtttgtccgggaacacacggatccagatcttaccttgacgcttaactgcacgggtcatagcacgacgtgctgcttcgatctgacgggcagtcagacgaccacggccaacagctttcagaccgaagctgccgaagctaacatccgtaccctgcgccagaccgcggttacggcctttgtgcattttacggaattttgtacgctttggttgtaacatcagcgacgctccttatttacggcctttacgctgctgctttttaggctgagcagccggtttttccggttgttcaacagcagccataccacccaggatctcgcctttgaagatccacactttaacgccgattacaccgtaagtggtgtgcgcttcagaggtgttgtagtcgatgtcagcacgcagagtgtgcagcggtacgcgaccttcgcggtaccattcggtacgtgcgatttccgcgccgcccagacggccgctaacttcaactttaatacctttagcgcccagacgcattgcgttctgtacagcacgcttcatagcacgacggaacataacgcgacgttccagctgagaagtgatgctgtcagcaaccagttttgcgtccagttcaggcttacgaacttcggcgatgttgatctgtgcaggaacgccagcgatgtccgctacgaccttacgcagtttttctacgtcttcaccttttttaccgataacgatacccgggcgagcagtgtgaatggttacacggatgctcttagccggacgctcgataacgatacgagatacggacgctttagccagttccttagtcaggtactgacgtactttaaaatcgctgtccaggttgtcagcgaattctttggtgttcgcaaaccaggtagagttccatggttttacaatacccaggcgaataccattaggatgtactttctgacccattgctagtctccagagtctcagcgatcggacacaaccacagtgatgtggctggtgcgcttcaggatgcgatctgcacgaccttttgcacgcggcataatgcgcttcatgctcgggccttcgtctacgaaaattttcgtaactttcagatcgtcaatgtcagcgccatcgttgtgttcagcgttagcaatggcagattccagaactttcttgaccagtacagccgctttcttgttggtgtaggtcaaaatatccagagcctggctcactttcttaccgcgaatcaggtcagcaacaaggcgaaccttctgagcagaagaacgagcatggcgatgtttagcgatagtttccatctcttcctcctaccttatttcttcttcgcttttttatcagcagcgtggccgcgataagtacgagtcggtgcgaattcacccagtttgtgaccaaccatttcgtcggttacaaataccggaacgtgctgacgaccattatggacagcgatggtcaaaccgatcatgttaggaaagatcgtactacgacgggaccaagtgcgcaggggcttcttgtctccgctttccaccgctttctctaccttcttcagcaagtgcaggtcaataaaaggacctttcttgagagaacgtggcatggcttatcctctaaaattatttgctacggcgacgtacgatgaatttatcagtacgcttgttgctgcgggtcttcttacctttggtctgaacgccccacggagttaccgggtgcttaccaaagttacgaccttcaccaccaccatgtgggtggtctaccgggttcatcgcggtaccgcgaacggtcggacgaacaccacgccagcgtgcagcacctgctttacccagaacgcgcagcatatgctcagcattgccaacttcgcccagagttgcacggcagtctgcttctactttacgcatttcaccagaacgcagacgcagggtgacataagcaccatcacgagcaacgatctgaacgtaagtaccagcggaacgtgccagctgaccgcctttacctggtttcatttctacgttatgaacagtagaaccaaccgggatgttgcgcatcggcagggtgttacctggtttgattgcagcatcaacgccagactgaatctggtcgccagctttcaggcctttaggggccaggatgtaacggcgttcaccgtctttgtacagaaccagcgcgatgttcgcggaacggttcggatcgtactcaagacgttcaacaactgccgggataccgtctttgttgcgtttgaagtcaacaatacggtaagcctgcttgtggccaccaccgatatgacgagtggtgatacggccattgttgttacgaccaccggatttgctgtttttttccagcaacggagcaaaaggtttgcccttgtgcagctcagggttaaccactttaactacgtggcgacgacccggagatgtcggtttacatttaacaactgccattgtattactcctccgacttactcagcgccgccaacgaagtccagattctggccttctttcagggtgacgtaagcttttttccagtcgctacgacgaccgatacgctgtccgtgacgtttaactttccctttaactaccagggtgttaacgacttcgacttcgacttcaaacagtttctgcacagcagctttgatttctgctttggtcgcgtctttagcaactttgagtacgatggtgttggatttttccatcgcagtagacgctttttcagaaacgtgcggtgcacgcagcaccttcagcagacgttcttcacgaatcatgccagcatctcctcaacttgcttaacagcatcagcagtcattacgactttgtcgaaggcgatcaggctaaccgggtcgataccagttgcatcgcgtacgtcaaccttgtgcaggttgcgcgcagccaggaacaggttttcgtccagctcaccggtgatgatcagcacatcttccagagccatgtctttcagtttctgtgccagcagcttagttttcggcgcttctacagagaacttctcgacaacgatcagacgatcctgacgtaccagttcggacaggatgcttttcagcgcgccgcggtacatcttcttgttaactttttgactgtggtcctgcggacgagcagcaaaggtcacgccaccagaacgccagatcgggctcttgatagaaccagaacgcgcacggccggtgcctttctggcgccacggttttttaccggaaccagttacttcagcacgagtcttctgagcacgagtaccctgacgagcaccagctgcataagcaacaacaacctggtgaaccagcgcttcgttgaaatcacgaccgaaggtagtttcggaaacagtcagcgcgctctgcgcgtctttcaatactaattccattgctatctccttacgccttcacagctggtttaacgatcaggtcgctaccggttgcacccgggacagcacctttaaccagcagcaggttgcgctcagcgtcaacgcgtactacgtcaaggctctgaacggttacacgttcgttacccatctgacctgccattttcttgcctttgaacactttgcccggagtctggttctgaccgatagaacccggaacgcggtgagacaaggagttaccgtgagtagcgtcctgggtacggaagttccagcgcttaacggtacctgcgaaacctttacctttagaggtgccagttacgtcaacttttttaacgtcagcaaacagttcaacgctaatgctctgacctacagtgaactcttcgccttcagccaggcggaattcccacagaccacggccagcttctacgccagctttagcgaagtggccagcttcaggcttggtcacacggttagcttttttagcaccggtggtcacctgaatagcacggtagccatcgttagccaggtctttaacctgagtaacgcggtttgcttcaacttcgattacggttactgggatagaaacgccgtcttctgtgaagatacgggtcatacccacttttttaccgactaaaccaatcattgtttcaacctctcaatcgctcaatgacctgattaacccaggctgatctgcacgtctacaccggcagccagatccagacgcatcagagcatcaacggttttctcggttggctcaacgatgtcaaccagacgcaagtgagtacggatttcgtactgatcgcgcgcgtctttgttgacgtgcggggagatcagaacagtgaagcgctctttgcgtgtcggcagcgggatcggaccacggacctgcgcaccagtgcgcttggcagtctcgacgatttccgcggttgcttgatcgatcagacgatgatcaaacgctttcaggcggatacggattctttggttctgcatgagaccagagctccaattattttataaacgaaaatgattactcctcagacccattacgattgatgggagagtgtaaccgttcttacgtagctccccgattgggagcattgttaggtagccaaattcggctaactgaggttcagattgaacctgctgtcaactacgacaagcccgcgcattatacatacttaaccaccgaacgcaagcgtattgctagtaaagtaaacagccttcgggttatctctcaagttcgttcagtgcatttttgacacgctctcttaaaccggctttctcttcgctttcttccacagtattttcttcgtcttcagaagaagagggggcattctcaaccgcgacgcctgggtcatcttcctcctcgacggattcgacgacggggagtggctgttttttgaagaaatagtgttgtgtactttgtttaaaagcgggcgtttcagcctctacagtgacttcggcttttactatccaaagcacccatagctgcctggcatacccaccaaccagcaccattcctgcaaaccacaggcaaatcagtaataaacaaattacatatattatggtgctgtgtttttgtcgggagaagataccagggtgacctgtttctttctgctcacgcgcggcgatatagaattcaaacattataatcccttgtgacgtaaaaactgcaaaacaaaagtcctacgcaggaattatttacgttttacgagaacccttcaatatgaattaaattacggcattaaaaataagaaaaaagcctgacaaatgaagcattttaaaaacagaaacattcatatttaaaatgttaaattgaattgatattttaaatatgaataatttattcgttctgacagtacgaataagatatgccgtcaacaaatgcaaaaagggcgccgaagcgcccttttcaattcaaaactaattaacgtgtaattagcccagaactttagcaacaacgcccgcgccaacggtacggccgccttcacggattgcgaaacgcagaccgtcgtccatcgcgatcgggtggatcagggtaacaaccattttgatgttgtcgcccggcattaccatctctacgccttccggcagttcgatggtaccagtcacgtcagtagtacggaagtagaactgcggacggtagcctttgaagaacggagtatgacggccgccttcatctttggacagaatgtacacttcagattcgaacttggtgtgcggcttgatggtgcccggcttagccagtacctgaccacgttcgatttcttcacgtttgataccacgcagcagaacacctacgttctcaccagcacggccttcgtccagcagtttgcggaacatttcaacgccagtacaggtagacttctgagtctctttgataccaacgatttcaacttcttcaccaactttgatgataccgcgttctacacgaccggtaacaacggtaccacgaccggagatggagaatacgtcttcgatcggcagcaggaacggcttgtcaatcgcacgctctggttccggaatataagaatccaggaagccagccagttccaggattttcgcttcccactctgcgtcgccttccagcgctttcagagcagaaccacgaacgatcggagtgtcgtcgcccgggaagtcgtactgagacagaagttcacgaacttccatttcaaccagttccagcagctcttcgtcatcaaccatgtcgcatttgttcaggaacacgatgatgtacggaacgcctacctgacgacccagcaggatgtgctcacgagtctgcggcatcgggccgtcagtcgcagcaactaccaggatcgcgccgtccatctgagcagcaccggtgatcatgtttttaacatagtcggcgtgccccgggcagtctacgtgtgcgtagtgacgggtcggggtgtcgtattcaacgtgagaagtgttgatggtgataccacgagctttttcttccggcgcgttatcgatctggtcgaatgcacgagcagcaccgccgtaggttttagccagtacggtggtgattgcagcggtcagagtagttttaccgtggtcaacgtggccgatagtaccaacgttaacgtgcggttttgtacgttcaaatttttctttagacacggctatattccttactatagtgctctccccttcaggagagagcacgggactttggtattaacccttaggcttatttaccacgggcttcaattacggcctgagcaacgttactcggcgcttcatcatacttcaggaattccatagtgtaacttgcacgacctttggtcagagaacgcagctgagttgcgtatccgaacatttcagacagcggtacttcagcgtggatcttaacgccagtaacttcagattcctgacctttgagcataccacgacgacggctcaagtcaccgataacgtcaccggtgttctcttccggagtttctacttcaaccttcatgatcggctcaagcagaactggtttcgctttcttaaagccttctttaaaggcgatagaagcagccagtttaaacgccagttcagaggagtcaacgtcatggtaagaaccgaagtgcagacgaatacccatgtctactaccgggtagcctgccagcggacctgctttcagctgttcctggatacctttatcaacggccgggatgtattcgccagggattacaccacctttaatgtcgttgatgaactcgtagcctttcgggttactacccggctccagcgggtacatgtcgataacaacatgaccatactgaccacgaccaccagactgtttcgcgtgtttaccttcaacatcggtaactttctggcggatagtttcacggtaagcaacctgcggtttacctacgttcgcttcaacgttgaattcacgcttcatacggtcaacgatgatgtcgaggtgcagttcgcccatacccgcgatgatggtctggttagattcttcgtcagtccatacacggaaagacgggtcttctttagccagacggcccagagccagacccattttttcctggtcagctttggttttcggttcaactgcgatggagattaccggctcagggaattccatacgttccagaatgatcggcgcatccgggtcacacagggtgtcaccagtggttacgtctttcagaccgatagcagcagcgatgtcgcccgcgcgaacttctttgatctcttcacgtttgttagcgtgcatctgaacgatacgaccgaaacgctcacgtgcagctttcacggagttcagtacggtatcaccagagttaaccacaccggagtaaacacggaagaaggtcaggttaccaacaaacgggtcggtagcgattttgaacgccagtgcagagaacggctcgtcatcacttgcgtgacgttcagccggagtgtctttaccgtcgtccaggataccgttgatcgcaggtacgtcaaccggggatggcaggtaatcaattaccgcatccagcatcgcctgaacacctttgttcttgaacgcagaaccacaggttaccaggatgatttcgttgttcagaacgcgctgacgcagagcacctttgatttctgcttcagtcagttcttcaccacccaggtatttttccatcagctcttcagaagcttcagctgcggattcgatcaggttctggtgccattcgttagccagttcaaccatgtctgccgggatatcttcgtattcgaaggttacgccctggtcagcgtcgttccagttgatagctttcattttcaccaggtcaacaacaccggtgaaatgttcttcagcaccaatcgccagctgcagcggaaccgggttcgcgcccagacgggttttgatctggttaacaactttcaggaagttcgcacccatgcggtccattttgttaacgaacgcaatgcgcggaactttatatttgtttgcctgacgccatacggtttcagactgcggctgaacaccaccaactgcgcagtaaaccattaccgcaccatcgagaacacgcatggaacgttctacttcgattgtgaagtcaacgtgccccggggtgtcgatgatgttgatgcgatgcggctcatactgcttagccataccagaccagaatgcagtagtcgcagcggaagtgatggtaataccacgttcctgctcctgctccatccagtccatggttgcagcgccgtcatgaacttcaccgattttatggtttacaccggtgtagaacagaatacgttcggtagtagtggttttaccggcgtcgatgtgcgcactgataccgatgttacggtagcgtgcgatgggtgttgtacgagccatttgtttcctcgtttatcttttaggcgttcaatttaagtagcccaaagcgggctgcttactggaagcgcccgcctggtgactaaaactccgaagggataaccaacggtagtgtgcgaacgccttgttggcttcggccatacggtgaacgtcttcacgtttcttaactgcagtacctttgttttctgcagcatcagaaagttcgttcgccaggcgcagagccatggatttatcaccgcgtttacgagcagcttcaacgatccaacgcattgccagagcattacgacgaaccggacggacttcaactggtacctgataagtagaaccaccaacgcggcgagacttaacttctacagtcgggcgcacgttttcgagagctacttcgaatgcttccagttcagatttaccagagcgctgagccagggtctccagcgcgctgtatacgatagattcagcagtagattttttaccatctaccatcaggatatttacaaatttagccagcagttcacttccgaacttcggatccggcagaattttacgctgaccaatgacgcgacgacgtggcatggaaatactccgttgttaattcaggattgtccaaaactctacgagtttagtttgacatttaagttaaaacgtttggccttacttaacggagaaccattaagccttaggacgcttcacgccatacttggaacgagcctgcttacggtctttaacgccggagcagtcaagcgcaccacgtacggtgtggtaacgaacacccgggaggtctttaacacgaccgccacggatcaggatcacggagtgctcctgcaggttgtgaccttcaccaccgatgtaggaagtcacttcgaaaccgttagtcagacgaacacggcatactttacgcagcgcggagttcggtttacgaggagtggtagtatatacacgagtacatacgccacgtttttgcgggcatgcttccagcgcaggcacgttgcttttcgcaactttgcgagcacgtggtttgcgtaccagctggttaactgttgccattaaatagctcctggttttagcttttgcttcgtaaacacgtaataaaacgtcctcacacaatatgaggacgccgaattttagggcgatgccgaaaaggtgtcaagaaatatacaacgatcccgccatcaccaggccatctggctggggtgcttaaccgtaagtctgacgaaatcagtatagtcaatgagaatgatgtcgttgctaatttgaccagtcaaaccgcgggcaataaggtcttcgttcagggcatagaccttaatgggggcattacgcagactttcaaggtagcggttaccgtcaactgcggcagttacgccatcttgcaataatagcagttcgtctccttcactgagcagacgcagcagcgcagcaaaatccgtcagccagggactgcgatgtaatgtgtgcagcataaacgcctcaaaacctcaaaataacatcgtagttggcgagttcgcggcgtaaggcatctgcttcgagcggcgtggcttcgacaacaaagggtgtctgcggatctaacccgcgttcgcgcagactagccgcacaaacccagcactgttcaatgtcgtacagacccaacaatttaaaagtggcaatgtaatcacgcgccagcactgcatcgggcttttgtcctggcagcagctgaaaaacgccatcagctataaagaagacagccagatcgtcagttaatgcggaagttgccagtaaagcatctaaaccttcccggcctgcggctgtaccatgaggtgcagtagaaaaaacaaacgcaattcgtttcatcagaactgtaccaccctgtcacaggtcaggctggcttccgccagcgccccaagtccgcttaaggtaaatccctgctgaaggttactgctagccagccccagtcttccggcctccgtttcatcaacaacgccacggcgtaatgctgccgctacgcagatattcagcgccacaccatgttgcgcattcagttgttgccaggcccgtacgaggtcaaattcgtcacttgccggagaggtcaattggttagcgttatagaccccttcccgatagaaaaagacgctgcttaactcatggccatctgctatcagcgcctgcgcaaactgaaaagcactactcgcctgttgcgtaccgtatgctggcccggtcaccacgatggcaaaacgcattacttatcttgcccctggaaatcaccgctcttgaactggcggatgtagagatagacagtgtgtttggagatgttcaggcggtcagcaacctggttgatcgcatctttaatatcgaagatccctttctcgtagagattcagcacgatctgacgatttttggcgttattagaaacattgcgatcggcattcacttcttcgatggtgaactccagcgtttgggtaaccagatcttcaacagaagaggcaaagttgacgctactaccgacatccggggtttctggcggcacaaaggtgctcataatctggctgaagggaacatcaagattcatattgatgcacagcagaccaattacacgctgttcgcggttacgaatcgcgatagtcagggacttcattaatacgccgcttttggcgcgagtaaagtagcatttagaaacgctgctatccgctcccgtcatatcgtgcagcatacgtagcgccaggtcagtaattgggctaccaatcttccggcctgtatgttcaccgttagcaatgcgaatggcactacattttagatcctgcaaagagtgcaaaacgatttcacagtgggagccaataagcatcgctaacccgtccaccaccgcttcgtaggatttcagaatatcaaaatcggtctggtcgaaaggacgttgatccagtaaatccaactcactggtttcgttggttaaaaggctcctggacatgaaaaaaaacactccttttcaggagcctgtcgttaacttttcagggcaggctcattaatgatgcgggtaactaaattaatacagcggaggttccgctttccagcactaattatatccggcctgtaataaaaaaaccgccgcctggtcaggcggcggttcttaatgcttattttttagcagaatctgcggctttcgcatcagcttccggctttgcatcagccttcggcgctggtttcacatccagcagctctacgtcaaacaccagggtagaattcggtgggatccccggaacacccgctttgccgtaagccagttctggtggaataaccagtttgatcttaccgcctttcttgatgttcttcagaccttctgtccaacccgggataacaccgtccagacggaaagaaagcggttcaccacgggtgtaagagttgtcgaactctttaccgtcgatcagcgtacctttgtagttcactacaacagtatcgctgtctttcggtgcttcgcctttaccggcttctactacctgataaaccagaccagtactagaggttttcacacctttctctttggcaaatttctcgcggtactctttaccttttgcttcgttatcagccgcgtctttttccatcttcgcctgagcagaagacttcacgcgagcttcgaatgcttgtagagtctgttcgatctcttggtcggagagtttgcttttatcagcaaatgcatcctgaacaccagcgatcagctgatctttatccagtttgatgcccagtttttcttgttcttttagagagttttccatgtaacgacccaggctggcacccagtgcataagcacttttctgatcgtcatttttgaacgctgctttgctgtcagcagctgtagcaggttttgcagcttcagcagcaaaagtgattggtgcatgcagggcaacggccattgtggtcgccagcagcgttactttaaacagacttttcatccatatctccaggatcggggcatctcaccccagggttaactattatcagaagggtactataaagcgttgtcgaacaaatctacatacagacacgccctattatcatctattttcagactctttttgtttaaattagtttcgatgaccgcgaaatgagtgctgtctcgggcagcaaagttaagtagaatccgcggcgaccattcgacaaaagaggtgaatcatgcaggatttaagtttggaagcacgcctggcagagctggagagccgactggcttttcaggaaatcaccattgaagaactgaacgtcacggtgaccgctcatgaaatggagatggcgaaactgcgcgatcatctgcgtctgctgaccgagaagttaaaagccagccagccgagcaacatcgcgagccaggctgaagaaacgccaccgccacattattgaggcgtaaaaaaagcggggattccccgcttttttgtcactttttcggtattagtggcaaccgcaaccgccgttgcctttaccgccacagcagccttcgccaccgtgttcatgaccgtgatcgtggccatgaccgccgcagcaaccgtcgtggtcgtgatcgtggtggtgatcgtgcgcgccgtgaacgtgaccatgagccagttcttcttcagtcgcttcgcgaatcgccacaacttcaacgttgaatttcaggttctgaccggccagcatgtggttaccatcaaccacgacgtgatcgtcttcaaccgcagtgatttcaaccggtaccggaccctggtcggtttcagccaggaaacgcatacctacctgcagttcatcaacgcccataaatacgtctttaggaacacgttgcaccaggttttcgtcgtactgaccgtaagcgtcgttcgcgccaacagcgacatcaaatttgtcgccaacttcatgaccttccagcgccgtttccaggccagagatcagggaaccgtgaccatgcaggtagtccagcggcgcactcaccggagactcatcaaccaacacaccgtcttctgtacgtacctgataggccaggctgaccaccaggtcttttgctactttcatgatatctcctgagcatgggaagaatagtggcgcagattgtagcggaattctgcagccgtgtactcactagcttaaaaaaactcggcgcatatcgttagtccggatgaaaaatcccgatcacttgctcatctttgcgaacgtgatcgcgggcttctttgtctgcttctcgcatctgatgtccgcacttaacacattcaacaatatcaatattattttcgcgccacatcgccatactatcctgcgcctgacaggccgggcattttgcgcccgcaataaaacgttttcggattgccatctttaccctttactcaaattcatcccagccgtccagctggcgtcgttcttgttgcatttcacgctggaaaatctcttccagttcgcgtcgggcttccctggcgcgagaaatttgtacggtatcggcatgcattgggatgagctctcgcagcatccgcatatccaggcggcgaaaatgcagttgcgctcgctgtgcctgatgcggatgcatgccaagcgtgaccagcgtcttgcgccccagctctaacgcactggagaatgtttcacgggaaaactgcgtcacccctgcctgtaataactcatgcgcttccacacgtccgcgcgctcgcgcaagaatatgcaaatgcggaaagtgctgttggcatatttccaccagcttcatggtgtcttccggctcgttacaggtaatgacgatagactcagcggcctctgcacccgcagaacgtaaaagatcgacctgcgtggcgtcgccgtaataaactttgtagccgtatttacgcatcaggttaacggcgctgatatcccgctccagcacggtaatgcgcattttatttgccatcagcaaacgaccaatcacctgaccaaaacgcccgaagcccacgacaatgacctggggtttatcatcgttgacccacggtttttcgtcttcttcttccggtccgttaaactggcgggatagccatttatccaccagcttcatcagcaacggcgtggtcatcatggaaagcgtcaccgtcaccagcaacaacgccatctggtcgccctggaataagcgttgactagaagcggtagaaaagaggacaaaggcaaactcaccaccctgactcaacacgccagcaaactgcatccgctcactgctacgcacgccatacaatcgcgccagcagatacagcacgagaattttcaccgccaccagcacaaccacgcttatcactacccacaacagatgggtataaagcaccccgaggttgagactcatgccgacagagataaagaacaaaccgagcagcaagcctttgaagggatcgatagccgtttccagttcatggcgatattcactttccgccagcagcacgcccgcaataaatgtaccgagcgccatgctcagccccagcgcatccataaacaatgcggaacccaacaccagcagcagcgtcgcggcggtgaacacttcccgcacgccagaagctgcaataaagcggaataccggacgcagtaaatagcgcccaccaatcagcatgccgacaaacgccagcaccttcatgccgaccttcatccagtcgaaatgttcgtctgcgctccccgccaacaacggcactaacgccagtgctgggattactgccagatcctgaaacagcagaacgctaaacccgagctggccggattcgctgcgattcatccctttctcacgcatcaattgcaacgccattgcagtactagacatcgcaaggccaatgccaccgaccaccgccgcctgccaggcgaaatccgtcagcatcaataatcccgccagcaacgccgcgcttaacagcacctgtgccgcgcctacgccaaaaatgctacgccgcagttgccaaagtttggagggattcaactcaaggccgatgataaacatcaggaataccacgccgagttcgctaaagtggaggatctcatcgacgtcgctaataaaccccagcccccacgggccaattgcaatccctgccagcaaatatcccaacacagcgccaatacccagccggcttgccagcggcaccgcagccaccgccgcgaagagaaacagcactcctgcgagtaaaaaatcggaaccttccatcagcggcctcctggagacagcggatttgccagccagtcaccgtaggctctggcgtggctcgccagctcctgtgcgctttgccgtctcgcccagtaaataatgatgggacttaaccaatgcatccggcacatgcccgccgccagttcaaaggggcgcagcacatcgctcatcgggtagcgattcagcgcgtcataacggtaagcactttccggctcgccggtggtaatcacgctacgccagtactttcccgccagttggtttcctcccggcccgctggcaaaaccacgacttaatacccggtccagccactctttcagtagcgccgggcagctataggtataaagaggatgctgaaagacaatcacctcgtgctcgcgcagtaatgcctgctcacgggggatatcaataaaaaaatcgggatagtgcgcgtaaaggtcgtgcacggtaacattgctgagctgcgtggccggtttaagcagtacccggtttgccacgctgtcctgagattccggatgggcatacagcagcaaaactttcgctggctgagacatcatccccctcccggtatggtttttgtgtatagtcgctgttttgggctaccattgcgcccggtgcggcagctcgcccatacattacattatcataatgataagttaacatagtctgaacatacggcaccttatgattgttttctccagcttacaaattcgtcgcggcgtgcgcgtcctgctggataatgccaccgccaccatcaaccctgggcagaaagtcggcctggtgggtaaaaacggctgtggtaaatctaccctgctggcattgctgaaaaatgaaatcagcgccgacggcggcagctacacctttccgggaagctggcaactggcgtgggtgaatcaggaaacgccggcgttaccgcaagcggcgctggaatatgtcattgacggcgaccgtgaatatcgtcaactagaagcgcagctacacgacgccaacgaacgtaacgacgggcacgccattgcgaccattcatggcaagctggatgctattgacgcatggagtattcgctcccgtgctgccagcctgctgcacggcctcggtttcagcaatgaacaactggagcgcccggtaagtgatttttccgggggctggcgtatgcgtcttaaccttgcccaggcgctgatttgccgtagtgacttgctgctgctcgacgaaccgactaaccacctcgatctcgatgccgttatctggctggaaaaatggctgaagagctatcagggcacgctgatcctgatctctcacgaccgcgacttcctcgatccgatcgtcgataaaattattcatatcgaacaacaaagcatgttcgagtacaccggcaactacagtagctttgaagtacagcgcgccacccgtctggcgcagcaacaagcgatgtacgaaagccagcaggaacgcgtagcgcatctgcaaagttatatcgaccgtttccgtgccaaagccaccaaagcgaagcaggcccagagccgcattaagatgctcgagcgtatggagctaattgcccccgcgcacgtcgacaacccgttccgctttagcttccgcgcgccggaaagcctgccaaatccgttactgaagatggaaaaagtcagcgcgggctatggcgatcgcattattctcgacagcattaaactgaacctggtgcccggcagccgtattggtctgttaggccgcaatggcgcgggtaaaagcacattaatcaaactgttagccggtgaacttgcgccagtcagcggtgaaattggtctggcgaaagggatcaaactcggctacttcgcccagcatcaacttgaatacctgcgcgccgacgaaagtcctattcaacatctggcacgtttagcgccgcaggagctggaacaaaaactgcgtgactacctcggcggctttggtttccagggcgataaagtaaccgaagaaacgcgccgcttctccggtggggaaaaagcccgcctggtgctggcattaattgtctggcagcggccgaatctgctgctgctcgacgaaccgactaaccaccttgacctcgacatgcgtcaggcactcaccgaagcattaatcgagtttgaaggcgcgctggttgtcgttagccacgaccgtcatttgctgcgttccaccactgacgatctctacctggttcacgatcgtaaagtcgaaccgttcgacggcgatctggaagattatcaacagtggttgagcgacgtacaaaagcaggaaaaccagaccgacgaagcgccaaaagagaatgcgaacagcgcccaggcacgtaaagatcagaagcgtcgggaagctgagctgcgtgcgcaaacccagccactgcgtaaagagattgcccgtctggaaaaagagatggagaagctgaacgcgcaactggcgcaggcggaagagaaactcggcgacagcgaactgtatgaccagagccgtaaagcggagttgaccgcctgcctgcaacagcaagccagcgccaaatccggcctggaagagtgcgaaatggcatggctggaagcccaggagcagcttgagcagatgctgctggaaggccaaagcaactgatggcgcagataacgacgaccgatgccaatgaattcagcagcagtgctgaattcatccccatgcgcggctttagcaattgtcatctgcaaaccatgctgccgcgtctgtttcgtcgtcaggtgaaattcaccccgtactggcagcggctggagttgcccgacggcgattttgtcgatcttgcgtggagtgaaaaccctgcacaggcgcaacataaacctcgtctggtggtgtttcacgggctggaaggcagtctcaacagcccttacgcccacggtctggttgaggcggcgcaaaagcgcggctggctgggcgtggtgatgcattttcgcggatgcagcggtgaaccaaaccgtatgcaccgcatttaccatagcggcgaaaccgaagacgccagttggtttttacgctggctgcaacgcgaatttggtcatgcgccaacggctgccgtcggctatagcctcggcggtaatatgctggcctgtttgctggcaaaggaaggcaatgatctcccggttgatgcggcggtgattgtctctgcgccgtttatgctggaagcctgtagctatcatatggaaaagggcttttcccgcgtttatcagcgttacttgctgaacctgttaaaagccaatgccgcgcgcaagctggcagcctaccccggaacgctgccgattaatctcgcgcagttaaaaagcgtacgtcgcatccgtgaatttgacgatctcatcaccgccagaattcacggctacgccgacgctatcgactattatcgtcagtgtagcgccatgccgatgctgaaccggatcgccaaaccgacgctgattattcacgccaaagacgatccgtttatggatcatcaggtgatcccgaaaccggaaagtctccccccgcaggtggagtatcaactgactgaacatggcggtcatgttggctttattggcggtacattacttcatccgcaaatgtggctggagagtcgcattcctgactggttaacaacgtatctggaggcgaaaagttgttgatattaacgtatctggaggcgaaatcatgttgattccgtggcaagacctctcccccgaaacgctggaaaatttaattgaaagctttgtgttacgtgaaggcaccgattatggtgaacatgagcgtacacttgaacagaaagtcgccgacgtcaaacgccagctacagtgcggagaagcggtgctggtatggagcgagctgcacgaaacggtcaatattatgccgcgcagtcagtttcgcgaataacctgcaaccgtcggcggacgagataataatgatagctaagtcatggagttactatgtctgccaaacatccggtcattgcggtaacaggatccagcggcgcggggaccaccaccaccagcctcgcgtttcgtaaaatattcgcgcagttaaatctgcatgcagctgaggtggaaggcgacagttttcaccgttacacccgcccggaaatggacatggcgatccgcaaagcgcgcgacgccgggcggcatatcagctacttcggccccgaggctaacgacttcggcctgctggaacaaaccttcattgaatacggtcagagcggcaaagggaaatctcgcaaatatctgcatacctacgacgaagccgtaccgtggaatcaggtaccggggacattcaccccctggcaacctttaccggaacccactgatgtactgttttatgaaggtttacacggcggcgtagtcacgccacagcataacgttgcgcagcatgtggacttactggtcggcgtggtgcctatcgttaaccttgagtggattcaaaaactgatccgcgacaccagcgagcgcgggcacagtcgagaagcagtgatggacagtgtagtgcgtagtatggaagactatatcaactacatcacaccgcagttttcccgcacccatcttaacttccagcgcgttcccaccgtcgacactagtaacccgttcgcggcaaaaggtatcccgagcctcgatgaaagctttgtggtgatccattttcgtaatctggaagggatcgatttcccctggctgctggcgatgttgcaaggcagtttcatttcccacatcaatacgttagtggtaccgggcggcaaaatgggtctggcaatggaattaattatgctgccgctggtgcaacgattgatggaaggaaagaaaatcgagtaactctgctattacgccggataaaatactatccggcttcacaacgggatagttaagtcacgcggcaaccacttcatagctgtgagtaatattcaccgctttttccagcatcaacgccacactacaatatttctcggcagagagatcaaccgcacgcgcaaccgctgcgtctttcaggtcgcgaccggtgacgataaaatgcagattaatgtgcgtaaacaggcgtggtgcctcttcgcggcgttcagaggtcaattttacttcacaatcgaccacatcctgacgccctttttgcaggatgctaaccacatcgatggcactgcaaccacccgccgccatcaacaccatttccatcggacttggtgctttatcgccactgttgccgtccattaaaatctgatgaccagaggcggattcgcccagaaaagttaacccttcgacccacttcactcgcgcttgcatttttgctactccactgcgtcaattttcctgacagagtacgcgtactaaccaaatcgcgcaacggaaggcgacctgggtcatgctgaagcgagacaccaggagacacaaagcgaaagctatgctaaaacagtcaggatgctacagtaatacattgatgtactgcatgtatgcaaaggacgtcacattaccgtgcagtacagttgatagccccttcccaggtagcgggaagcatatttcggcaatccagagacagcggcgttatctggctctggagaaagcttataacagaggataaccgcgcatggtgcttggcaaaccgcaaacagacccgactctcgaatggttcttgtctcattgccacattcataagtacccatccaagagcacgcttattcaccagggtgaaaaagcggaaacgctgtactacatcgttaaaggctctgtggcagtgctgatcaaagacgaagagggtaaagaaatgatcctctcctatctgaatcagggtgattttattggcgaactgggcctgtttgaagagggccaggaacgtagcgcatgggtacgtgcgaaaaccgcctgtgaagtggctgaaattagctacaaaaaatttcgccaattgattcaggtaaacccggacattctgatgcgtttgtctgcacagatggcgcgtcgtctgcaagtcactagtgagaaagtgggcaacctggcgttcctcgacgtgacgggccgcattgcacagactctgctgaatctggcaaaacaaccagacgctatgactcacccggacggtatgcaaatcaaaattacccgtcaggaaattggtcagattgtcggctgttctcgtgaaaccgtgggacgcattctgaagatgctggaagatcagaacctgatctccgcacacggtaaaaccatcgtcgtttacggcactcgttaatcccgtcggagtggcgcgttacctggtagcgcgccattttgtttcccccgatgtggcgcagactgatttatcaccccgatatcaactatgcacttcgacaaacgctggtgctatgtttgcccgtggccgttgggttaatgcttggcgaattacgattcggtctgctcttctccctcgttcctgcctgttgcaatattgcgggccttgatacgcctcataaacgttttttcaaacgcttaatcattggtgcgagcctgtttgccacctgtagcttgctgacacagctactactggcaaaagatgttcccctgccctttttgctgaccggattaacgctggtacttggcgtcactgctgagctggggccattgcacgcaaaattgcttcctgcaagcctgctcgccgccatttttaccctcagtttggcgggatacatgccggtctgggaaccgttgctcatctatgcgttgggcactctctggtacggattgtttaactggttttggttctggatctggcgcgaacaaccgctgcgcgagagtctaagtctgctgtaccgtgaactggcagattattgtgaagccaaatacagcctgcttacccagcacaccgaccctgaaaaagcgctgccgccgctgctggtgcgccagcaaaaagcggtcgatctaattacccagtgctatcagcaaatgcatatgctttccgcgcaaaataatactgactacaagcggatgctgcgtattttccaggaggcgctggatttacaggaacatattagcgtcagtttgcatcagccggaagaggtgcaaaagctggtcgagcgtagccatgcggaagaagttatccgctggaatgcgcaaaccgtcgccgctcgcctgcgcgtgctggctgatgacattctttaccatcgcctgccaacgcgttttacgatggaaaagcaaattggcgcactggaaaaaatcgcccgccagcatccggataatccggttgggcaattctgctactggcatttcagccgcatcgcccgcgtgctgcgcacccaaaaaccgctctatgcccgtgacttactggccgataaacagcggcgaatgccattacttccggcgctgaaaagttatctgagtctaaagtctccggcgctacgcaatgccggacgactcagtgtgatgttaagcgttgccagcctgatgggcaccgcgctgcatctgccgaagagctactggatcctgatgacggtattgctggtgacacaaaatggctatggcgcaacccgtctgaggattgtgaatcgctccgtgggaaccgtggtcgggttaatcattgcgggcgtggcgctgcactttaaaattcccgaaggttacaccctgacgttgatgctgattaccaccctcgccagctacctgatattgcgcaaaaactacggctgggcgacggtcggttttactattaccgcagtgtataccctgcaactattgtggttgaacggcgagcaatacatccttccgcgtcttatcgataccattattggttgtttaattgctttcggcggtactgtctggctgtggccgcagtggcagagcgggttattgcgtaaaaacgcccatgatgctttagaagcctatcaggaagcgattcgcttgattcttagcgaggatccgcaacctacgccactggcctggcagcgaatgcgggtaaatcaggcacataacactctgtataacagtttgaatcaggcgatgcaggaaccggcgtttaacagccattatctggcagatatgaaactgtgggtaacgcacagccagtttattgttgagcatattaatgccatgaccacgctggcgcgggaacaccgggcattgccacctgaactggcacaagagtatttacagtcttgtgaaatcgccattcagcgttgtcagcagcgactggagtatgacgaaccgggtagttctggcgatgccaatatcatggatgcgccggagatgcagccgcacgaaggcgcggcaggtacgctggagcagcatttacagcgggttattggtcatctgaacaccatgcacaccattagcagcatggcatggcgtcagcgaccgcatcacgggatttggctgagtcgcaagttgcgggatagcaaggcgtaatgcaggctaaaccatcggataaggcattcacgccgcatccgacatcttttgcctgatgcttcgtatttacgccccaaccaccttcgccaccgcgtgggcgaaacgttgcatcccttcatcgatatccgcatcttccaccaccaggctcggtgcaaaacgcatcacatccggtccggcattcagcaccattacgccagcctctgcgcccgcatacaggaaatcacgcgcccgacctttgtactgtggtttcagctctgcgccaatcaacagccccataccgcgaatatcgctaaatacatcgtactgctgatcgatcttctgcagatggtcaacaaaacgctggcgtttcgcctgaatgccttccagcacttcaggggtattgatgatatcaaacgccgcccccgctactgcacaggccagaggattaccgccgtaggtggaaccgtgagaaccaggatgaaacgcagaagcaatttccgccgtggtcagcatggcgctaatcgggaagccgccgcctaacgctttcgcagaggtcagaatatccggcgtaacgccgtagtgcatgtaagcaaacaaatcgccggtccgccccatcccgcactgcacttcatcaaacaccaataatgcctgatgttgatcgcacagctcgcgcaagccctgcaaaaactctggcgtcgctgccgtcacaccgccctcgccctggatcggctcaaccaccaccgcacaggtgtgatcatccatcaccgctttcactgcatggagatcgttaaagggaacgtggatgatgtctgccggtttcggcccaaagccgtcggaatattttggctgcccacccacgctaacggtaaacaggctgcgaccatgaaaagcgttatggaaggcaataattttggttttgaacgggctatgacgcacacaggcgtaatggcgtgccagtttaaaggcggtttcgttagcttccgtgccggagttcataaacaccacgcgttcggcaaacgttgcctcaatcagtttacgcccaagacgcagcgccggttcattggtgaaaacgttactgatatgccacagagtttcgccctgggtttttaacgcgttcaccagcgcaggatggcaatggcccaacgccgtaactgcaatgccacccgcgaaatcgacatactccttgccttgctgatcccagattcggctgccctgaccttttaccggaataaactctgccggagcataaatcggcaggatcacttcatcgaaagtcgcgcgtgtaattgctgtttgttcaattgccatctcatgatcaccctgttacgcataaacaaatgtgaaattataaccacaaaatatgcataaaaaatcactaaatggcaatcagaaatcagcgatgcaggaaattagccagcagttgatgtccttgttcgctaagaatactttctggatggaactgcacaccttccagatcccactggcgatggcgaatccccataatctctcgggtttcgctccaggccgtcacgtcaaagcacgctggtaaactgtcaggttccaccaccaggctatggtagcgtgtcacggtaagtggatttgccagcccccgaaatacgccctcaccgttatgtgtaatcgggctggttttgccgtgcatgacctttgcggcgcgcacaactttaccgccaaatgcctgcgccattgcctgatgaccgaggcagacgccaagaatcggcaagcgcccggcatagtggcgaataacgtcaagggagatcccggcttcatctggcgtacaggggccaggactgatgacaattttttgtggtttaagggcgtcgatatccgccagcgtcaacgcatcgttgcgcttaaccagcacatccgcccccagttcacaaaagtactggtagaggttccaggtaaaagaatcgtagttatctataagcaggatcatggcggctccggtacaaaagaaccgcgctattttactcagattccccggcttcgcttaccactttgctaaatatcatctgcagtgcggtgagatcccccattgccccactctgatttgcctgattccaggcctctttttcgataccctgccagctcagttgatatccggcatgaatcgccagttgctcgaagaagatccgctgtgccagaccacttcccacccggaagggatgcagcacgttgatttcacaatagtaatgcgccagccgctcgacgaacttcgctttctccaggccaaccagataaccttcttcctccagatcctgcatcagggcattgccctctttttcgatataagcaaagtggcagaacggcgtatcaccctgataaatatcaacttcacgcagttgccctgcccagtcgaaaatatcctgatacagctggcgatggatagttcgcaaatgcggtaaaccgcgcaccagcggaccaagctcaatggtcgcagcacgcagcgccgtcatttcgtaagcggcctgttccagccgctgctgctggcggatgttcagccggttacgcatgatatcaaggcctggataaagatacggatcgcgcccttcgccgaatttatcgctcatagtgactcctcagctcttcaaggcgcgctaaagcctctgcggcagtaagagtgactaaaggcatctcgacgccttcaagacggcgactggcctgaaaattacgattacgctgaagctcccagagacgggacttttgcttatcggtgagtttcttcacttgatgcctccctgaacgtgtccatttgccacaagtataagcggcaaatccgggttacgccgggagagcagaagcgcgggcaagattgcccgcgcgagaaatcattacggcaggactttagcggaaaggataactaccggtttactcggcacattctggtacggaccaacgtcatgagtcggcacctgggaaatcttatcggcaacgtccatgcctttcaccactttaccaaataccgcgtaaccgaaatcacgctgaccatggtcaaggaaggcgttatcggcaacgttgataaagaactggctggtggcgctgtctttgtcagcggtacgtgccatcgcgatggtgccacgcgtgttgcgcaggccgttatcggcttcatttttgattggcgggtttggttttttctgctgcatctgctcggtgaaaccgccgccctgaatcataaagccaggaatgacgcggtgaaaggtagtgttgttataaaaaccgctgttcacataatcgacaaagttttgcacagacactggcgctttttgtttatccagctccagttcgatgttaccagcactggttgtcaacaatacgtgcgggtcccctttcgctgccattgctgcgggagaaagagcagaaagagcgaaaacagcagccatcgccgccagggtgcttttgaacatgagatttccttaacaaacagagcagaaaaaaagcaagtgaagagattctaaatagccttcaagaacaaggccatccctttacctaattttacgtatctgaaatatatgtaacctgacgatcactttttattccgtgatcaaaatcacctcttaaaatgcaatttagcaaccgattgcaataaaacatttaaacagatcacaaaatcacctaaaatcgcccgctcgcggcatatcccgctatgccattttatttttgaacgcaggccaatcatgactaacagcaatcgcatcaagctcacatggattagctttctctcctacgcactgactggtgcgttggttattgtcaccgggatggtgatgggaaatatcgccgattatttcaatctgcctgtttccagtatgagtaataccttcaccttcctcaacgccggcattttaatctctatcttcctcaacgcctggctgatggaaatcgtcccgttgaaaacgcagttacgttttggctttctcctgatggtgctggcggttgccggtttgatgttcagccacagcctggcgctgttcagcgcggcgatgttcattctcggggtggtcagcggcatcaccatgagcattggtacattcctggtaacacaaatgtatgaagggcgtcagcgcggttcccgcctgttatttaccgactccttcttcagtatggctgggatgattttcccaatgatcgccgcgtttctactggcgcgcagcattgagtggtactgggtttatgcctgcatcgggctggtgtatgtcgctatttttattctgaccttcggctgtgagttcccggcgctgggcaaacatgcgccaaaaacggatgctccggtagagaaagaaaagtgggggatcggcgtactgtttctctctgttgcggcgttgtgctacatcctcggtcagttaggttttatctcctgggtgcctgagtatgccaaaggcctgggcatgagcctgaacgacgcgggcacgctggtgagtaacttctggatgagttacatggtcggcatgtgggcgttcagctttattcttcgcttctttgatttgcaacgcattctgaccgtactggctggtctggctgcgattctgatgtacgtctttaacaccggaacaccagcacatatggcgtggagtattctcgctctgggcttcttctccagcgcgatctataccaccatcatcaccctgggtagtcagcagaccaaagtaccgagcccaaaactggttaactttgtcctgacctgcggaaccatcggtactatgttgacctttgtggttaccggcccgatcgttgaacatagcggtccgcaggcggcactgcttacagcaaacggtctgtacgctgtcgtctttgtgatgtgcttcctgttaggtttcgtcagccgtcaccgtcagcataacaccctgacctctcattaattgctcatgccggacggcactatcgtcgtccggccttttcctctcttcccccgctacgtgcatctatttctataaacccgctcattttgtctattttttgcacaaacatgaaatatcagacaattccgtgacttaagaaaatttatacaaatcagcaatatacccattaaggagtatataaaggtgaatttgatttacatcaataagcggggttgctgaatcgttaaggtaggcggtaatagaaaagaaatcgaggcaaaaatgagcaaagtcagactcgcaattatcggtaacggtatggtcggccatcgctttatcgaagatcttcttgataaatctgatgcggccaactttgatattaccgttttctgtgaagaaccgcgcatcgcttatgaccgcgtacacctcagctcttacttctctcaccacaccgccgaagagctgagcctggtgcgcgaaggcttctacgagaaacacggcatcaaagttctggtcggcgaacgcgctatcaccatcaaccgtcaggagaaggtgattcactccagcgccggacgtaccgttttttatgacaagctgatcatggcaaccggttcctacccgtggatcccgccaatcaaaggttctgatactcaggactgctttgtctatcgcactattgaagacctcaacgccattgaatcctgcgcccgtcgcagcaaacgcggtgccgttgttggtggcggcctgttaggtctggaagccgcaggcgcgctgaaaaacttaggtattgaaacccacgttatcgaatttgcccctatgctgatggcagaacagcttgatcagatgggcggcgagcagctgcgtcgcaaaatcgaaagtatgggcgtgcgcgttcacaccagcaaaaacacccttgagattgtgcaggaaggtgttgaagcgcgtaaaaccatgcgttttgccgacggcagcgaactggaagtcgactttatcgtcttctctaccggtatccgtccgcgcgataagctggcaacccagtgtggtctggacgttgctccgcgtgggggtattgtcattaatgattcctgccagacttccgatccggatatctacgccatcggtgaatgcgcaagctggaacaaccgtgtatttggtctggtagcacctggctacaaaatggcgcaggtcgccgttgaccatattctcggtagcgaaaacgcctttgaaggtgctgaccttagcgccaagctgaaactgctgggcgtagacgtaggcggtattggtgatgcgcacggtcgcacgcctggcgcacgtagctacgtttacctcgacgaaagtaaagagatctacaaacgcctgattgtcagcgaagacaacaaaaccctgctcggtgcggtactggtgggcgataccagcgactacggtaacctgctgcaactggtgctgaacgctatcgaactgccggaaaacccggattccctgatcctgccagcacacagcggtagcggcaagccgtctatcggtgttgataaactgccggacagcgcgcaaatctgctcctgcttcgacgtcaccaaaggtgatctgattgctgccatcaacaaaggctgccacacagttgcggcgctgaaagctgaaaccaaagcgggtactggctgcggtggctgtatcccgctggtcactcaggtactgaacgcggaactggcgaaacagggcatcgaagttaacaacaacctgtgcgaacactttgcttatagccgtcaggaactgttccatttgatccgcgttgaaggcattaaaaccttcgaagaactgctggcgaaacacggcaaaggctacggttgtgaagtttgtaaaccaaccgtcggtagcctgctggcctcctgctggaacgaatacattctgaagccggaacatactccgctgcaggattctaacgacaacttcctcgctaacatccagaaagacggcacctacagcgtgatcccgcgttctccgggcggtgaaatcaccccggaagggctgatggcggtaggtcgtatcgcgcgtgaatttaatctctacaccaagatcactggctcccagcgtctggcgatgtttggcgcacagaaagacgatctgccggagatctggcgtcagctgattgaagccggcttcgaaaccggtcatgcctatgcgaaagcactgcgtatggcgaaaacctgcgtgggtagcacctggtgccgctacggcgttggcgacagcgtcggcctcggcgtggaactggaaaaccgctacaaaggcatccgtacgccgcacaaaatgaagttcggtgtctccggctgtacccgtgaatgtagtgaagctcagggtaaagacgtgggtattatcgccactgaaaaaggctggaacctgtatgtttgcggtaacggcggcatgaaaccgcgtcatgcggatctgctggcggcggatatcgatcgcgaaacgctgatcaaatatctcgaccgcttcatgatgttctacatccgtactgccgacaaactgacgcgtaccgcaccgtggttagaaaacctcgaaggcggcatcgattacctgaaagcagtgatcattgacgacaaactggggctgaacgcacatctggaagaagagatggcgcgcctgcgtgaagcggtactgtgtgagtggactgaaacggtcaatacgccgtctgcgcagactcgcttcaaacacttcatcaacagcgacaagcgtgacccgaacgtgcagatggtgccagagcgcgaacagcaccgtccggcaacgccgtatgaacgtatcccagtaactctggtggaggacaacgcatgagccagtggaaagacatctgcaaaatcgatgacatcctgcctgaaaccggcgtctgcgcgctgttaggtgacgagcaggtcgcgattttccgcccgtatcacagcgatcaggtgtttgcgatcagcaacatcgacccgttcttcgagtccagcgtgctgagtcgcggactgattgcggaacaccagggcgagctgtgggtcgccagcccgctgaaaaaacagcgttttcgcttaagcgacggcttgtgcatggaagacgaacagttttccgtcaaacattacgaagcgcgagtgaaagacggcgtggtgcagctgcgcggttaatgttttaacgggaggcgcaatgcctcccctttttgcatggtcctgtaataatcttcggtatattgcaggacattttttaaactttttgttttattttttgtttttattttttaaaggataatcaaatgtttacagacactattaataagtgtgcggctaacgctgcgcgcattgcacgcctgagcgcaaataacccgctcggcttttgggtcagctccgccatggcgggcgcgtatgtgggtcttgggatcatcctgattttcacgctcggtaatttgctcgatccatccgtacgccctttggtgatgggcgcgacctttggtatcgccttaacgctggtgattatcgccggttctgaactgttcaccggacacaccatgttcctcacctttggggtaaaagcgggcagcatcagccacgggcaaatgtgggcaatcctgccgcaaacctggctgggtaacctggtcggttccgtcttcgttgccatgctctatagctggggcggcggtagcctgctgccggtagataccagcatcgttcactccgtcgcgctggctaaaaccactgcaccggcaatggtactcttcttcaaaggtgcattgtgtaactggctggtttgcctggcaatctggatggcgctgcgcactgaaggggcggcgaaatttatcgctatctggtggtgtctgctggcatttatcgcgtccggctacgagcactctatcgctaacatgacgctgttcgcgctctcctggttcggcaaccacagcgaagcctacacgctggcgggtattggtcataacctgctgtgggtgacgctgggtaatactttaagtggtgccgtattcatgggattgggttattggtatgctacgccgaaagcgaatcgtccggttgcggacaaatttaatcaaactgaaacggctgccggttaattactaaggggtttttacgtggatcatttgcctatattttgccaattacgcgatcgcgactgtctgattgtcggcggtggtgatgtcgcggaacgcaaagcaaggttgctgttagacgcaggcgctcgcttaacggtgaatgcattagcgtttattccacagttcaccgcatgggcagatgcaggcatgttaaccctcgtcgaagggccatttgatgaaagccttctcgacacctgctggctggcgattgcagcgacggatgatgacgcgcttaaccagcgcgtcagcgaagccgctgaagctcgtcgcatcttctgtaacgtggtcgatgcgccgaaagccgccagctttattatgccgagcattattgaccgcagtccgctcatggtagcggtctcctctggcggcacctctccggttctggcacgcctgttgcgcgaaaaacttgaaagtctgctgccgttacatctgggccaggtagcgaaatacgccgggcaattacgcgggcgagtgaaacaacagttcgccacgatgggtgagcgtcgccgtttctgggagaaattgttcgttaacgaccgcctggcgcagagcctggcaaacaacgatcagaaagccattactgaaacgaccgaacagttaatcaacgaaccgctcgaccatcgcggtgaagtggtgctggttggtgcaggtccgggcgatgccgggctgctgacactgaaaggactgcaacaaattcagcaggcagatgtggtggtctacgaccgtctggtttctgacgatattatgaatctggtacgccgcgatgcggaccgtgttttcgtcggcaaacgcgcgggataccactgcgtaccccaggaagagattaaccagatcctgctgcgggaagcgcaaaaaggcaaacgcgtggtgcggctgaaaggtggcgatccgtttatttttggccgtggtggcgaagagctggaaacactgtgcaacgcgggtattccgttcagcgtggttccgggtattaccgcagcttctggttgctctgcctatagcggtattccactcacgcatcgcgattatgcccagagcgtacgcttaattaccggacacttaaaaaccggtggcgagctggactgggaaaacctggcggcagaaaaacagacgctggtgttctatatggggttgaatcaggccgcgactattcagcaaaagctgattgaacacggaatgccaggcgaaatgccggtggcaattgtcgaaaacggtacggcagtcacgcagcgcgtgattgacggtacgctcacacagctgggagaactggcgcagcaaatgaacagtccaagcctaattattattggtcgggttgttggcctgcgcgataaactgaactggttctccaaccattaatttaacccgggccagagaattctggccttcttaatgactctttttatatattcagcaaataaaacatagccccttaataaatattatctgctaatgggttatattcaccgttacagcgacttacaaaattaagtcattcgctcactgacgccaattaaatattcctgtatcgttcttaacgagcagtctgcttatattcatataatcaatgaatattaattaatatataatacatagggaatgtaaatgaacaaatttattaaagttgcactggtaggtgcagtactggctacgttaactgcatgtactggtcatattgaaaaccgtgataagaactgctcttacgactacctgctgcacccggcaatttctatttctaaaatcattggcggttgcggtcctactgcacagtaagtctctgacagaaatcggctaacaccggtttaattgcccgacgccctctggattttccgagggcgtatttgtttctatgtccttcttgcccccgcccgtaaaaatattttcactttaaattcaatttgataactacatccattagccacagcgcgatcctgtgcgaaattttgtgatcttcctccacattacataacatcatatgttgttatattcatcatgcattgtcatgttaccttttaaatgactgcaaactctcccctacaacgtattggacaagaaaaaggtatcgctatgggaagccaggaactccaacgcaagctcggattttgggccgttcttgcaatcgccgtcgggacaaccgtcggctccggtatttttgtatctgtgggtgaagtggcaaaagcagcgggcacgccgtggcttacggtgctcgcgtttgtcattggcgggttaattgtgatcccgcaaatgtgcgtctatgcggaactatccaccgcttatccggaaaatggcgcagattatgtttatctgaaaaatgccggaagccgaccgctggctttcctctccggctgggccagcttctgggccaacgatgcgccgagtttgagcattatggcgctggcgattgtcagcaatcttggctttttaacgcctatcgatccgttgctcggtaaatttatcgccgccggattaattatcgcctttatgttgctacacctgcgctccgttgaaggcggcgcagcgtttcagacgctaattaccatcgccaaaattatcccgttcactatcgtcattggccttgggatcttctggtttaaagcggagaattttgccgcccctaccaccactgcgattggcgcaacgggcagctttatggcgctgctggcggggatctctgccaccagttggagctataccggcatggcctctatctgttatatgaccggcgaaattaaaaaccccggaaaaaccatgccacgagcgctgattggttcctgtctgctggttctggtgctctacaccctgctggcgctggtgatttccggcctgatgcccttcgacaaactcgccaattctgaaacgccgatttccgacgccctgacctggatccccgcactcggcagcaccgctgggatctttgttgccatcacggcgatgatcgtcattcttggtagcctttccagctgcgtgatgtaccagccgcggctggaatacgcgatggcgaaagacaacctgttctttaaatgcttcggccatgtgcatccgaaatacaacacgccggatgtctccatcatcctgcaaggggcgctggggatcttcttcatcttcgtttccgatctcaccagcctgctgggttatttcaccctggtgatgtgtttcaaaaataccctcaccttcggctccatcatctggtgtcgtaaacgcgacgattacaaaccgctgtggcgtactccggctttcgggctgatgaccaccctcgccattgcgagtagcctcattctggtcgccagtacctttgtctgggcaccgattcccggccttatctgcgccgtcatcgttattgctactggtctgcctgcttacgccttctgggcgaagcgtagccgccagctcaacgctttgagctaatgttatctggagaaaataaaatgttggatattgataaaagcaccgtggactttctggtcaccgaaaatatggttcaggaagtggaaaaagttctcagccatgacgttccgctggtgcacgccatcgtggaagagatggtgaagcgcgacattgatcgtatttatttcgttgcctgcggaagcccactcaacgcggcgcaaacggcgaaacatctggcggatcgcttttccgatcttcaggtctacgccatttccggctgggagttctgcgataacaccccgtatcgcctcgacgatcgttgcgcagtaattggcgtttctgactacggtaaaaccgaagaggtaatcaaagcgctggagctgggccgggcctgcggcgcactcactgcggcgttcaccaaacgcgcggatagcccgattaccagcgcggcggaatttagcattgattatcaggccgactgtatctgggaaattcacctgccgctctgctacagcgtggtgctggagatgatcacccgcctcgcgccgaacgcggaaatcggcaagatcaaaaacgatctcaagcagttgccgaatgcgctcggtcatctggtacgcacctgggaagaaaaaggccgccagcttggtgaactggccagccagtggccgatgatttataccgttgctgcgggtccgctgcgtccgctgggttacaaagaaggcattgtaacgctgatggaatttacctggacgcacggctgcgtgattgagagcggagagttccgccatggcccgctggagattgtcgaaccgggcgttccgttcctgttcctgctcggcaatgatgaaagtcgccacaccaccgaacgcgccattaactttgttaaacagcgtactgacaacgtgatcgtcatcgattacgccgaaattagccaagggctgcacccgtggctggcaccgttcctgatgttcgtgccaatggagtggctctgctactacctgtctatttacaaagatcacaacccggatgaacgccgctattacggtggtctggtggaatattaatccctctcccggcccggcaacgggccggatttacgcaaggagttacccgatgaaaacaggtatgtttacctgcggccaccagcggctgcctattgaacacgcatttcgtgatgcaagcgagctgggttacgacggcatcgaaatttggggcggtcgcccgcacgcgttcgcgccggacttaaaagcgggcggcatcaaacaaatcaaggcgctggcgcagacgtatcagatgccgattatcggctatacgccagaaaccaacggctatccgtataacatgatgctgggcgatgaacatatgcgtcgcgaaagcctcgacatgatcaagctggcgatggatatggcaaaagagatgaacgcgggttatacgctgatttccgcggcccacgcgggctatctcacgccacctaatgttatctggggacggctggcagagaacctaagcgaactgtgtgagtacgcggaaaacatcggcatggatctaatcctcgaaccgttaacgccgtatgaaagcaacgtcgtgtgtaatgctaatgatgtgcttcatgcgctggcgctggtgcctagcccgcgcctgttcagcatggtcgacatttgcgcgccgtatgtccaggcggaaccggtgatgagttatttcgacaaactgggcgataaattacgtcatctgcatattgtcgacagcgacggggccagcgacacgcattacattcctggagaaggcaaaatgccgctgcgggaactgatgcgcgatattattgagcggggctatgagggttactgtacggtggagctggtgacgatgtatatgaacgagcccagactctatgcccgccaggcgctggaacgctttcgcgcgctgctgccggaggatgagagatgaaaaccctggcgacaatcggcgataactgcgtcgatatctacccgcaactgaataaagcgttttctggcggtaatgcggtcaatgtggcggtgtactgcactcgctacggcatacagccgggatgcattacctgggtgggtgacgatgactacggcacaaagctgaagcaggatctcgcccgcatgggcgtcgatatcagccatgtccatacgaaacacggcgttaccgcacaaactcaggtggaactgcacgacaatgatcgcgtttttggcgactacaccgaaggcgtgatggccgactttgccctgagtgaagaggattacgcctggctggcgcagtatgacattgtgcacgcggcaatctggggacatgcggaagacgcattcccacagctgcacgctgcgggcaaacttaccgctttcgacttctccgacaagtgggacagcccgctctggcagacactggtgccgcatctcgattttgcctttgcctccgcaccgcaagaagacgaaacgctgcgtctgaagatgaaagcgattgttgcccgtggcgcaggaacagtgattgtcacgctgggtgaaaacggcagcattgcctgggatggcgcgcagttctggcgtcaggctcctgaaccggtgacggttatcgacaccatgggtgccggagatagcttcattgccggattcctttgcggctggtctgcggggatgacattaccgcaggcgatagcgcagggaacggcgtgcgcggcgaaaaccattcagtaccacggtgcctggtaagtataacgttggcgtgagcatcttcacgccaacgtgctgttacttgccggaaaacgaccctataatccgagtaattcattctttatttcagggtcgattatgagtgctacggaccgctactctcatcaactcctctacgctaccgtccgccagcgactgctggatgatatcgcgcagggggtttaccaggcgggcaacagatccctaccgaaaacgagctttgtacacaatataacgtcagccgcattaccattcgcaaagccatcagcgacttagtggcagacggcgtactgatccgctggcagggaaaaggcacctttgtacaaagccagaaagttgaaaacgccctgcttactgtcagtggttttaccgattttggcgtcagtcaaggcaaggcgacgaaagagaaagtgatcgaacaggaacgggtcagcgccgcgccgttttgcgaaaagctgaacatccccggaaacagcgaagtgttccatctctgccgggtgatgtatctcgataaagagccgctgtttattgatagtagttggatcccgctgagccgttatcctgactttgatgagatttacgtcgaaggaagctccacctatcagttatttcaggagcgttttgacacgcgagtggtcagcgacaaaaagaccatcgatatctttgccgccacccgcccgcaggcaaaatggctgaaatgcgaactgggcgaaccgttgtttcgcatcagcaaaatcgcctttgatcagaatgacaaaccggtgcacgtctccgaactcttctgccgcgccaatcgcatcaccttaactattgataataaaagacattaaccgtaggccggataagatgcgccagcatcgcatccggcgatgctggcgcgttgaattttacatcccgtacgttcccctcaccctaaccctctccccaaaggggcgaggggaccgttcagtacggaatttagcttgacggtgctatccagcattaaatactggcaatactctcacgcaaaatccgcagcaccgtctcttcaccgctgcgattcgggttaatgcgaatcgcacaatgttcactttgtggattcgcctggcgaaacgttccggaaaggcgataaaagagcggcgggatttcatatttgctctctgcacccaccgggtaaggcaaggcaccgcgcttttgcgcctcttccagcactctggcggcaatcggctgatgaaactcgacaatcaacaccttgctctgcgcattagcaatcaccgcgcttttcacttccggcaccgcaccaccgttaagcaaagccagcaaccgttcagatacccctgcctgcaccgcgtgcatcactggcgcaaacaccagaccacgcaatacttccagcgcctgtgcgccctggatctggctaccgccggagtaaagcgtggcgcgaatacggttgataacatcagcatcgccgaccactgcaccaacaccctctggcccaaatagcttgaagcaggaaaatgtgctgacattcgcgccgcattcacagccgattcgagccaccttcatcaccgcatagttgtcatcggttaacgctggaacacctgccgcgcgcaacgttgccagcacatctgccagcacgtagctgtcctgcggctgctggcgcgtatgctgcaccagcgccgcatccggttgttgctcgtcgacgacctgcttcagtgcgctcaggtcattgaaatcaacagtaataagcgtcagccccatctgctcaataataacccgtgtcgtcgggtaaacaggcgcgtcatgcaccagaagacgctgccccggtttgagcaaagccgccagcccggcgcgaatcgcgccagtccccgcgtcctgcaccagcgccgcagcctgtgcgtgaaatgcatcagccagcacctgttccacacgctgggtaacgcgcggttgattcagtcctggcgttaagcctaaatcaccgccagtaagaaactcgctgccggggaaatggcgacaaatgctatccaccagcgcaaactgcttttgctgcgcctcaataatcgtcaggctttgcagaggaaacgtcttcataggtgccttccttaagccggaacgaacaggccaagccagtaaagaacattcagcagaataccggtgatcattactgccacgaccggtgccgccattttctgtaccggacggcccagggattcgttgaggaagtaaatggcaaccgcgatagagaatccggtataacccgccatcttaattgctgcgaaaatgctaccgaccagcagcgccacttccatcagcatattcatggcgttacggatgttatcgctcgcattacgcacgctcgggtagcgtcccagccatttgccgatgctacgaagcagcaagacttccgcgctaataaccactgcgcctaataccgctgcaaccatcggattcgggctgagatagtccaccgcataaacaaaggtaaagcccgcaactgcatacacacccgttgctaacgcggtggtggcaatcaacggcacaaaccccagtccgcgcataaattctgccagagccgcctgattaatcagcgtttggctttgttccggcgttacgcctgcggaatatgctttctccagtgtgaagatgctcacttcactgccagcaaaaatcttcatgctggcaacggcggcaatcaatgctcccacgatggcgatatagggtaagtttttgataatccgactcgtgcgttcttcaaacacgctaagcccgctggcatcaatgtcattttcatcacgatgacgcaggtcgtgagttatcgcgatccccagcagcatcaccatgccaataaagatttcgatggattcagggttaagatgtgggaaatagcgcacgactaccacacgggtcatcagtaccaccacggcggcgatcagactttgcttccagccaaactggtagaaaatcgccaccagcgggaacagtgcaaaagcactaaccaccgggctgcttaattcccccaggctacctaatacatccaccggcagcgcggtcagcagctggtttactggcaacaggcaagtaaggatcaacacgccccagatagcgccaagaccaaacgccatcaggctgtttatcgccaggacgccgaggatatcggtaggaagaaagagtaaccatgcgttgagcagcccggttttcagggtaaaagagatccccacgctggccacaaaaccaatgctcagaccaaaagcgatactccccgcctcgcgacggttcatatagccttcaatcagttgcggcaggatcgggcggatgccgtcatgaaaaacagccgcgctgcgatgcgccagaaggcttgtcatacccgtcaggcacgccaccacgataatctgaatatacagatccatagtcgtgccttttatttcagatggttaatcagcatcggaatcgcgtgttcgacgtgctcaacggaaaggccaaacgccacttttccttcagcgatcattttggcgatatgctcgtctttcgctttaatgcctggtttggcaatggtgcaacttttgttatagcctatcaccgcgatggcaatgctcaatgccgcgcccgcaccggtattacacgcgccgatgtaataatccagttgcccggatttcaccttcattgccgcttccatgtcgttgtgaatgaaaacttcaaaacagccaggagccgtcgcttcaatagtttttttaatctgctcacgctgtaagcctgcaacgccaatctttttcatgagtctgtccttattggaaaaattgagagggattttcacgtaacatcacatccacatcggcctgactgaatccactctggcgcaattgcggaataaaggtggttagtaaatagtcatagccataaccaccgttggcttttaaatgggagcggcgcgtaatatccatgctcagcatgacgcggttcagcaacccacggtcgcgtagcgcatgaagcatcgcaatacgcttttcgtccgggtagtaactgttcttgccgatggtgtcgaactgcacgtacgcgccgagatcgatcatcttcaaaatgttgtcgaggttgtctttcagatcgcagtgaccaacggtgacgcggctaagatcaaccccgtgggcttgtagcaacgccagttgctccagccccatcgtgctgaagctcgtatgcgtggagatcgggcgtccggtctggttatgcgccagcgcagcggcaataaataccttctcttccagcggcgtaatctttccttcgctggtgccgatctccgcgatgatcccggctttcagctccgtgccatcgataccctgttcaatttcatcgaccatctcctgcgccagttcctgcacgctgcgggtcgccacatgttccgggaaaaacgcgtcctggtaataaccggtacaggccaccacgttgatccccgtctcgcgcattacatcaagcataaattgcgcattgcgccccatgtaacggttggtcatctcaatcacattacgcacgccccgggtcatcaggtcgttcatctcctggcaaatgaacgcatactgatcaaggcggcagtccacgttgtttttaaagccggagagatcaatatgcagatgctcatgggcgagggtgtaacccgtcggatcaaaactcatagggtgtctcctgcaaaccggagggaggaaagaaaagagcgaccattttgtggcggtggcgcgcggaaaaattcacacacggtagcccccacatcagaaagcgtggtgcgcacaccgagctgcgtagcgatcatcccttgctgataaaccagcactggcaccacttcgcgggtatggtggctgtgaccaatggtcggatcgttgccgtgatccgccatcacgaccaggcaatcatctggctgcatcgcctcaacaagccgggcaaggttacggtcaacgacctgcaaacgttcggcataacgtgcgacgtcttctgcatgaccagcgaggtcggtttcctgaatgttggtgcaaataaacgccgtcggatgggtgttaaattcgttgagggtgatatccataatccgctggctatccaccagattttgccagctcacgccataaggattgttgacgatatctgccaccttacccaccagcacggttggcacgcctgcttcatacagtttttgtggcacctgcactttttcatcgacgccatagcccatatgcacgacctggaaaccgttgtcataagcgccagaacgcggcgcattgataccaataaagcgcccttctttgctttctgcggcatcgagaatgcgttgactgtcggttaacaggccaccaaatgtaatgacccgaccgacctgtacctgctcacgcacgatacgaccaattttgattgcgtcgtcaaaagagatcacagagagattggcggtaatgttatagacctggcctaaatccgcctcgagattatcgccaatcgcaaccgcctgattgacccacagaaattgcagatcatcgccacggcgctccacctgccagccagcggaaactaatgcctgctcaacacggtcaatcacatcgcgaaaaggcatccgcagcggcggtaacgggcgcgtgcctaaaatttcctgatgccccataaaggtatcgccaccttcatgttgcagctctgccacgccccaggttgcggaatcactcggctgcatatcgcctggcgcataacccaatgcgttgattagccccagcgtctccagcgttggtagctgcaaatgcggcaactggctcaggatgtgaccacatgtattcgctcccgcatcttgcggacgcaccagcgtgacatctttcattgcccctacgccaaagctatcaatcactaacaccacaaatcgcgccattacgcccccagagagtttccaagactgtcataacgaccgacgatttccggttcgccacgatgaataccggacaccagcaccacatcgctacgggtgacaaaaatctgcgtgcgaaaacagagcaccactgcactgcttaccggaaactcgcctgccagcggcagggtgtagtcgatactgctgtcatccacagttttgagattggtttcagtaatcttttgattttctggcgtaaacaccaacgcatgttgcgcatgaccacgacgatagtaaccgccgccgtagcagtagctgtcgccacggaaatgatgggagatttcacttaaccagagcatcgcgatacgttcaggctgatcgccctgctggtttgccggaatagtgcccgtcagcgcatgaccgggttcggcatgagtcacaccgtattgcgccagtaatggcaggctagtgcagctggtcgcactaggcgcgttcagttgctcaagtgcaataccagatttcgccagttgatcccgtgcctgtatcagcgtgtgaagattcggtgtcggcaaaacttttccgacagcctcatcccaaagcaggcaagggaaatgggtaagtccggctaaatgcagccctggcagattctggatttcggcgacaatctccggcaacaccttgagggcaaaaccgctctcctggcccggataaagaaaatcatcgtcgctataaactttaagcagcacagactggattcgcccggccttcaccgccgccgcagaaacttcccgcgctttgtcgagagtaaacacggtgatgacgtcggtgccctgttcaacggcgtcagcaacctgatgacaagggatttgtaccagatgcccctgatgcgccacaggcaaaccagcgcggcgcatgactcgcgcctctttgtaatccaccgccacaatgccgctgtagcctaatgccagcaatttttccgccagccacggattacgaccaaactgcttggtcatcagatacagttcaatgccgtaaagccgcgccgtctcaatcagccgcttaccgttttccagtatctgatccacgtcgatcacccagctgtccggggcgatcttgccctgctgccacaggcttagtgcggcggaaatcagcgccgggttctggcgtttcaatgcttctacaaacatcttgttgcctcgtttctgttccttgaattaaatattcatttttttgaatatttaggttgtgcgacgtggatttgtcgggagcttcaaacctcttcgttagcagccatccataatccataaaggttggccagcaaatagccttcttcacacgggttaacttccagtgcgaattccttcaacaacacctgatgcaattgcacaacggcttgccagtggctggattgcgccagttctgccagcaactcgttatccagcggctctatttcttcaccacggcgactgcgcatcagtgcactcgccatatgtgtcatcgccatcgttccttgctcactgcgcaccggcagatggcactctgtttccagtacgttgacgacctgcatcatgcctttgcagatgtccttatcaataacgcctgcctcgcaaagcaggttgagtctggtttccatatcagatgcctttcgtttaataactcggttcctgttccccactcactacccgttgttgatgggcgagcagggcgtgtttatctacaacggcacgcagcagttgttgcattgggtaatcatcgactcgcgtcaggaccacggcttcggtggcctgtaaaaatcgcggatcgtctgtgagcggcgtcgcctctaatcccagcatggtcagttcgttttccgccaccacgttccagatcaccgcatcgacatcgcctttaacaatgcgttgtaaactctcgtgataagagagatcgactcgttccacatcactaccgccaaaaaaaacatcggtcatgattttctgatccgcgctacggttatccagccccacgcgcttcacgtttgcggactcgcctttacggcaaatcaactggtgctcgccaacgtaggtgtgcggccccaactccagcgcgaggcataagcctttttgcgtgagataactttccgccgctagtcggctaaccaccgccatgtcatacacgccattaagcagacactccacgcgaatatccgcgccacgcatgtgcgcatagtaaaaaggaatgccatcaaactgggctttcaatccgctcgccaggccttcgtacaaacgggtatagggcaagggcattgcacataccacgttgttgatatccacatgagtcagcaatgctttgttatccatctcgaccagataactgccattgcgcccacggcgttcaatccgtatcgctccgctactttccagcgttttcaacgcggcctgcgtcaggccaacggaactacggcattcatttgccagctcatctatggttttcaatcgattaccgcacttttcacccaacaaataacgggccagcgtcgtgatgacgacgccttcttttttgataaacgttcgacgcataataaattttcagtaaattgaatatttatatcttcaggaatttgaagataaggcgcaacagcgagatgtggaaacggcgaggcacttcacattttttcggattattgcaaatgaggataaaaaaaccgggtttccccggtttcagagtgatgataaaagcaaaattgcctgatgcgctacgcttatcaggcctacatttccttgcaatatgtgcattactttgtaggccggataaggcgttcacgccgcatccggcatgaacaaagcgcaatttgccagcaatagtgaattacggcttcgccacaaaaccaatcgcttcgtacaccgcttttagcgtacgggaagcgtgcgcgctggctttttccgcgccatctttcatcacctgttgcaggaaggcttcatcgttgcggaaacggtgatagcgttcctgcaattcagtcagcataccggaaacggcatcagccacttcacctttcagatgaccatacatcttgccttcgaactgtttttccagttctgggatgctctggcccgttaccgcactaaggatatccaacaggttggaaacgcccgctttgttctgcacatcgtagcgaactaccggcggctcgtcggagtcagtgaccgcacgtttgattttcttcactacgcttttcgggtcttccagcaggccgataacgttattgcgattatcgtcagacttggacatcttcttggtcggctccagcaggctcattacgcgcgcgccagatttcggaataaacggctccggcaccttaaagatctcgccatacagcgcgttgaaacgctgggcaatatcgcggctcagttcgaggtgctgtttctggtcttcacccaccggtaccagattagtttgatacagcaggatgtccgctgccatcagcaccggatagtcaaacagaccagcgttgatgttctcggcataacgcgcagatttatctttaaactgcgtcatgcgactcagttcgccgaagtaggtatagcagttcagtgcccagcctaactgtgcatgttccggcacgtgggactgaacaaaaatggtgcttttctcaggatcgataccacaagccagatacaaggccagcgtatccagcgtcgctttacgcagcttctgtgcatcctggcgcacggtgatcgcgtgttggtcaacgatacagtaaatgcaatggtagtcatcctgcatgtttacccactgacgcagcgcacccatgtagttaccaatggtcaattcaccactgggctgtgcgccactaaaaacgatgggcttagtcatttttgctttcctgattttcgctatgcggaagccctaatgcgggcagaaggtcatttatagactgataaattacatcaggctggctgagatcgatagcctcgccgtagttatatccgtaggttaagccaacacttgggcaacctgccgcttttgccgcctgaatatcattgcgactgtcgccgacaaacagcatctgttgtggggcaattcccatccgctcagccaccagtaacagcgggtccggatgcggttttttgttttgcacatcatcaccaccaatcaccacgctgaagtatttggcgatatctaaggcttcgagcagcggcgcgacgaacggcgtcggtttgttggtgaccaggcctagcggcaggcctttagcctgcaacgcgcccaacgtatcggcaacgtgcgggaacaaaaacgtcccctcttcggcaacctcgccatagtagcgatcgaacagtttacgcagaatacgtacctgttcttctgccggaatgtcgtcatcaacgggcggtttacccattgttttacgctgagtcgcacgttcctgacgcgcccaggtcaatgcgcgctccatcagaacatctgcgccgttaccaatccaggtaataacgcgttcttcacctgcgacgggcaactccagcgcatacagcgccatatctaccgcagcagcaagaccaggagcactgtcgaccagcgtaccatcaagatcaaaagcgacgccgcgaatatcttcaaacttattcatgacttacctttgccagttcactgcgcatttcatcaatgacttttttgtagtctggctggtcgaagattgcgctaccggcgacgaacatatccgcgcccgccgcagcgatttcgccaatgttgttcaccttcacgccaccgtccacttctagtcgaatgtcaaagccagactcgtcgatacggcgacgtacttcgcgcagtttatccagtgtttgaggaatgaaagactgaccgccgaaaccagggttgacggacatcagcaggatcacatccagcttatccatcacgtaatccagatagctcagaggtgtcgccgggttaaataccagacccgctttacagccattttctttaatcagttgcagcgtgcggtcaacatgctcggaggcttctggatgaaaggtaatgatgctggcaccagcggcagcgaaatcaggcacaatgcgatcgacgggtttcaccatcaggtgtacgtcgataggggcggtaatgccatagttacgcaaggatttcagcaccattggcccaatcgtcagattgggaacatagtggttatccatgacgtcaaaatgcacgacatcagcgccagctgccagggcttttgcggtatcttcacccaggcgggcaaaatcagcgctcagaatactgggggcaatcaaatactgtttcatccgcttctccttgagaattattttttcgcgggactaacgactcctggtttgtacaaagccagcagttcgtccacctttttacgtgtgccgccgttgctgcttatactgcgtcgaactttgacgacatgcaattttgcgcgctgataccactcacgcgttaacatcgtatcgtgattggagatcagcactggaatatggcgctcaaccagaccttcggcgatctccgccagatgcgcttgttgttcaagcgtaaaactgtttgtgtgatacgccgtaaagttggcggtcgcagacagcggtgcataaggcggatcgcaatagacgacggatgcatcatctgcgcgcgccatgctatcggcgtaagactcacaatagaaaaaggcattctgcgctttttcagcgaagtgatacaactctgcttccgggaaatagggttttttgtagcggccgaacggcacgttaaactcaccgcgcagattgtaacgacacaggccgttgtaaccgtagcggttcaaatataaaaacagtaccgcccgacggaacggatcctggcttttgttgaactcttcgcggaactgatagtaaacctcggcgcaatttgtttcgggaacaaacagctcgcgtgcggcctgtacgtactcatcagtacgcatcttcacaatgttatagagactgatcaggtcgctattgatatcggcaaggatataacgagaaaagtcggtgttgagaaacacgctcccggcacctacaaaaggctcaaccagacattcgcccttgggcaaatgccgtttaatatcatcaagcaggggatacttgccccctgcccacttcaaaaaagcgcgatttttcttcatgctgactaactaattacaccttctccggctgtggagaaagctccgacagcatccagcgcttcaggcaactcccgcaacgataaaccattgcgggagataaccttgattacttcagatcggcctgtacctgacgcagcggtttcgcccacgggtttttggcctggacatctgctggcaatgtagataccgcttttttcgcctcttctttgctagcgtacacgccagaaaccaggacataccacggctgaccattacgcgtcgtttcatagacaacgtagtttttcagattctctttcttcgcccaaccgttcaggttgtcgtagttagaggaactgctcagctgcagagtgtaatggctggacggtgcgcttttcaagctaccaacattacctgcggtcttcgccccagcagcgggtgttgctgtggtttgcgccggggatgccgtctgtactggagccgtagtcgccgtctcttttggtgctggcgtagaagtcgcagccggtgccttcgtgctcgccacaggggcagctggttcagtacgcttcggcgtctgtgctaccggcttcggctccgttttcacggttgcttgcggttttttcggttcaatcaccgcctgctgacgagctgggcgcgtagtggacggacgttcagcggtttgcgttttcgccgtgtcacggcttgcattgccattgcgaacaggcgcaaccgttgcgggttcagtcggcaacgtggaattgaccgccacattgttcagctgttgctgattttgtggctgggtcagcgcattgttcaggtcaccctgcacttcaacacgttgttgaccatccgttgccaccggggtttgcccttgagtcggcgtagaagagatcggtggcagagaaacatcctgctgagtattttccgcagacgtggttcccggcgctggctgcacgccattcgcctgatcggtcgcattgccagcaagatcaatactcttctcgccagacgcggtttgatcgctggaagtggtgctgggggcttttagcgcagaaccgataccgatgatcaacagcagtagaaccagaatgccgacgcccatcatcatatactgacgagaagcgggtttactggctgcttttttgcgcttacgcggacgacgctctacgcgctcttcatccacggtttcatcttcggattcgtcaatttcttcttcgatttccggttcctcattgcgctctttttgcgcacgagtcggacggcgatcgtcagtgtcatcaagttcaatatcatcaaaattgatctgcggttcgccacgttcagtacgctcagaacgttcagaagattgacgagaacgaccagtacgacgatcgctgggatcgggtttcagctcgtcttctggtttgaattcatccatttaacaccccactaaaaggttaatgcttaccacgttgcaattaacctgaagctaatagaccgcttgataagcggcctgacctttcttgttgttacgcactttgacaatcggcaatggcgttaagaacaagctcgtggctaacgccgctgcgaacttcactcttaccaattgccaacggaagaattaagcgcatctctcccgcaaggactttcttgtcacgcagcatatgcggtaaatacgcctgcgcggacatttcgcgcggcccattgaccggtaacccagcccgcttgagcagggttataatacgctgcgtttcggcagaactaaactgcccgagacgttcgctcgtccgcgccgccatcaccatacccgcagcgaccgcttcaccatgtaaccaattgccataccccatttcagcttcaatggcatgaccaaaggtgtgtcccagattcagtaaagcacgtaacccggtttcgcgctcgtcggcggcgacaacttctgccttcagttcacaacaacggcgaatacagtacgccattgccggaccgtccagacgcaacaacgcatccagattctcttccagccagttaaaaaacgcaccgtcaagaataatgccgtatttgatgacttctgccagcccgctcgctaactcacgcgggggaagcgttttcagacagtcgagatccaccaccacactagcaggttggtagaacgcgccaatcatgtttttaccgaggggatggttgaccgcagttttgccgccaacggaggaatcgacctggctcagtaacgtcgtcgggacttgaatgaaacggacaccgcgctgataactcgccgccgcgaagccggtcagatcgcccactacgccgccgccaagcgccaccagcgtagtatcgcgaccatgcggtttttgtaacaacgccgtaaagacggtatcgagtacagccaggcttttatactgctcgccgtcagggaggataacgctatcgacgttaacacccgcctgttcaagtacgccgcggaccttatcgagatacagaggagccagggtttcgttggtgaccaacatgacctgctcgccgcttttcagcggtaagaaactagctggttcattaaacaaaccagatgcgatggtaattgggtaactacgttccccgagagtaacgacaatcctctccataacgcgacatccaccttaattactgtacccgcagacgagtgtatataaagccagaattagttgctttccagcatgtgaataatctggtttgcaaccactttagcgctttgatcatcagtacgaatggtcacgtcggcaatctcttcatacagcggattgcgttcattggccaacgcttccagaacttcacgcggcggtgtttcaacgtgcagcaacgggcgttttttatcacgctgcgtgcgtgcaagttgcttttcgatggtcgtttcaagataaacgacaacgccacgagcggaaagacggttacgcgtttcacgggatttcacagagccgccgccagtagccagcacaataccctgtttctcggtcaactcattgatgaccttttcttcgcgatcgcggaagccttcttcgccttctaaatcgaaaacccagcccacatcagctccggttcgtttctcaatctcttgatcggaatcgtaaaattccatattgagttgttgagctaactggcgcccaatagtgctttttccggcacccataggcccaaccagaaagatattgcgtttctctgccattttttcggtactactaagactattcgttaatgataaacccgcttcgctcagagagcgccgcaggacatgaactgaaacctcataagatattgcgagagtcagactgaaaattatctcaatactccagcgggtttggcaactgaataaatcacccatccctctgcatatctggtcgctgcaagcgcgctgccttgctaccaccgctctggcgataaatcaccgggtaagattagcgtaaaaaagacagcaaaatgccgcctgaatgataaatcatcatcatggaacgcaggcagcgaagagcaccaactctcaaatcggtactccttgtatgctaaatacctgcgcgcgtcaaatagatgaaacacgttcagcgtaaaaacattaccgcttttacggctgtttactcactggaaaccagtcgtggcgtgataaacaccactaactcgcgtcgttcatcttcttttccgtcatgacgaaatgattgcccgaaccagggaatgtcgccaagcaacggtacgctatcctgaccgcttttatttttacgggtaaaaatgccgcccagcgccaacgtttctccgcttttgacctcgacctgcgtttcgatctcctgcttatcaatcgccagcacttcgccatcggcctgctgtagcacctgccccggaacgttctggctgatgtgtaatttcagccggatgcgacctttttgtaacaccgtgggcgtgacctccatccccaggacggcctctttaaattccacgctcgtcgcgccactttccccgctggaaacctgatatggaatttcgctcccctgtttaatgctggcaggctgaagatgactggccagcagacgcggactggcgataatatccagctgctgtttttgttcgagcgcggaaagctcaagatccagcaagcgtccgttgatgcgcccaatgttaaaaccgacatgcgttgtcgccgtcgctacggagaggtcgctaccaagcgtggtgacttgcccaacgccaccagcgtgttgcgcatcggccagcgtccatttcacgcctaactcacgcaaacttttttcattaatggtgacaatatgcgcgctcagctcaacctgcccgaccggcagatccatttgcgctacccactgttcaagcgcgcttaacgccgttttgttatctcgtagcaaaaggcgattggtgcgtttatcgacggtcatactccctttggcactcagcagcttctcccccgctttcgccagttctcccgcgtcggcgtattgcagggttatactgcgattttccagcggcagatttgcctgcgcccgcgcctgctccgcctcctggcgggcgatattgttattctgccaggcaatggaatgcacactgagaatgttgccttcctgccgcgttatcagtccggcgcttttcactacagtttgtagtgcctgcttccagggaacatctgttagatgtaagctcaccgtaccgctgacgtctgggctcacgaccaggttcaacttctcctgttcagccagcgcctgcaacacctgagctaccggaacgtcatccaccatcagcgtcactttttgcggctttgccgcctgtacgccgggtatcagcatcaacagtagtgcggctatccattgcttcatttgtatctccttgccgttgccacaaccattgtggcggttcgcagtttgtcccggtacccagcgttagtacgtctggcgtcagctgtaaaattgtccagccgttttccagcacatcgttttgctgcacccgtcgccatttcttttgcccgtcttttattacaccgatgatgcgctcgcctcgccctaccatcccctgatagcgccactggctaagttcgctaatccggcatagatcttccggcggtttaaaagggtcacgcataccggttaaaaggcacaatgcaatacctgccaacaaccagcgtttaaccctcatgcggcgtctccagttgtagcgtgaacaaaagatcatcaccttccacgcttaagctaaaacggctcacgctgacgttgcgctctgccagccgtgtaaatgcgctcggcactgcttcccacagcgttttcaacgccaactcgcctccctgcgcggatggatgccaggaaaccagttgcgcgccggataactgaaaatccagtgggctaaagggcagcgttttttcctcgctgaagggagcggtgtctaccaggcgatacagtgcggcccactgctggtgatgacttgcccgtagtcgaattaatgcgtcgcgctcttcatggtgtgtgctactcagaaaaatgagcgtaactaacatcagcaaccagaatgcccagcaaagctggcggaggcggggacttgtggcgaaccaccagtcaaagaacatgttcatcgctaaccttccttgttaactgatactcaaattgccagcgtccctgcgcatcctgctgcgtggctccccgctgattgagatgaaaagatgcatcctggcggagactcgtttctagtgcgtttaacgcggtaatgcttgttgtcagccccttgatctccagcgttccctgctgccagcttatcgttgtcagccaggcgtgctcgggtaaaagcgccgccagtgcttccagcgcagattgccagtcgcgggtaaattgtcgctggcgctgccgttggctacgctgttcgcgtaactgctgttgctccagcaaacgtggcttcgttatctgtaagctgcgggcgagttgttgttccgcctgaagcaaaactgcgtctatgcgcgcttcggcgctgcctgtcagacgcagtattagcgttatcccgacggccagcagcagaggcgcaacgaacatcagcaaccagaaacgcagaaaagcggtccggcgttgctgtcgccagggcaaaaaattaattggcgggttcatcagtacgccttcccaagcgccagccccagcgcgatggcaaagtctccacctggcggcggtagcggcggctgacgaacagaaacggcctcccagggatcaaatccgccttcgccacatatcgcgacgctttcgggatcaacggataacgctgccgccagctccttcgcgctagtcatccccaccgccagtttgcgcccccagctatagcgcgtcgcccacagccactgttcgttatcacgccaggccagacattgctgatgagaaggtaaaaaaggcaggaatcgctgtaatgcactggcatccggggtgatcgcgctcacatgaacacgcaacctttctgccagagtaagcagcgttgccagctctttgctttgcgcggcagtcacgttataggcgggactgagactgtcttcgctgtaatcgaagcgcagggagtccggatccatatccagctcgcgggccatcgtcccactcagccaggccgtttgctcccgctcaccaagggacatgctcgggcgcggaaaactccgctgtaatgtgcgactggcgggaaacgccaacataatgtgatgacgctgcggcagttcgcgactccacggtaacaacgttttagccagctgctgcgcatcaacaatccgcccatctttgataatgtcgttctccagcggcaaccgccaccagcgttgcaaaaagcattcttttgcgccccgcacgatcgcaaccgctaccgcttcttgctgttgtaaatgcaaaccaatttgccagatcttaaatgccattgtgatgatctccttatcacccgtcactctgacgggtatatcaatgcgtctggcttgcctttatactaccgcgcgtttgtttataaactgcccaaatgaaactaaatgggaaatttccagtgaagttcgtaaagtattttttgatccttgcagtctgttgcattctgctgggagcaggcagcatttatggcctataccgctacatcgagccacaactgccggatgtggcgacattaaaagatgttcgcctgcaaattccgatgcagatttacagcgccgatggcgagctgattgctcaatacggtgagaaacgtcgtattccggttacgttggatcaaatcccaccggagatggtgaaagcctttatcgcgacagaagacagccgcttctacgagcatcacggcgttgacccggtggggatcttccgtgcagcaagcgtggcgctgttctccggtcacgcgagtcaaggggcaagtaccattacccagcagctggcgagaaacttcttcctcagtccagaacgcacgctgatgcgtaagattaaggaagtcttcctcgcgattcgcattgaacagctgctgacgaaagacgagatcctcgagctttatctgaacaagatttaccttggttaccgcgcctatggtgtcggtgctgcggcacaagtctatttcggaaaaacggtcgaccaactgacgctgaacgaaatggcggtgatagccgggctgccgaaagcgccttccaccttcaacccgctctacagcatggatcgtgccgtcgcgcggcgtaacgtcgtgctgagccggatgctggatgaagggtatatcacccaacaacagttcgatcagacacgcactgaggcgattaacgctaactatcacgcgccggagattgctttctctgcgccgtacctgagcgaaatggtgcgccaggagatgtataaccgttatggcgaaagtgcctatgaagacggttatcgcatttacaccaccatcacccgcaaagtgcagcaggccgcgcagcaggcggtacgtaataacgtgctggactacgacatgcgccacggctatcgcggcccggcaaatgtgctgtggaaagtgggcgagagcgcgtgggataacaacaagattaccgatacgctgaaggcgctgccaacctatggtccgctgctgcctgccgcagtcaccagcgccaatcctcagcaagcgacggcgatgctggcggacgggagcaccgtcgcattgagtatggaaggcgttcgctgggcgcgtccttaccgtagcgatactcagcaaggaccgacgccgcgtaaagtgaccgatgttctgcaaacgggtcagcaaatctgggttcgtcaggttggcgatgcatggtggctggcacaagtgccggaagtgaacagcgcgctggtgagcatcaatccgcaaaacggtgccgttatggcgctggtcggtggctttgatttcaatcagagcaagtttaaccgcgccacccaggcactgcgtcaggtgggttccaacatcaaaccgttcctctacaccgcggcgatggataaaggtctgacgctggcaagtatgttgaacgatgtgccaatttctcgctgggatgcaagtgccggttctgactggcagccgaagaacagtccaccgcagtatgctggtccaattcgcttacgtcaggggctgggtcagagcaaaaacgtggtgatggtacgcgcaatgcgggcgatgggcgtcgactacgctgcagaatatctgcaacgcttcggcttcccggcacaaaacattgtccacaccgaaagcctggcgctgggtagtgcgtccttcaccccaatgcaggtggcgcgcggctacgcggtcatggcgaacggcggcttcctggtggacccgtggtttatcagcaaaattgaaaacgatcagggcggcgtgattttcgaagcgaaaccgaaagtagcctgcccggaatgcgatattccggtgatttacggtgatacgcagaaaagcaacgtgctggaaaataacgatgttgaagatgtcgctatctcccgcgagcagcagaatgtttctgtaccaatgccgcagctggagcaggcaaatcaggcgttagtggcgaagactggcgcgcaggagtacgcaccgcacgtcatcaacactccgctggcattcctgattaagagtgctttgaacaccaatatctttggtgagccaggctggcagggtactggctggcgtgcaggtcgtgatttgcagcgtcgcgatatcggcgggaaaaccgggaccactaacagtagcaaagatgcgtggttcagcggttacggtccgggcgttgtgaccagcgtctggattggctttgatgatcaccgtcgtaatctcggtcatacaacggcttccggagcgattaaagatcagatcagtggttacgaaggcggtgccaagagtgcccagcctgcatgggacgcttatatgaaagccgttcttgaaggtgtgccggagcagccgctgacgccgccaccgggtattgtgacggtgaatatcgatcgcagcaccgggcagttagctaatggtggcaacagccgcgaagagtatttcatcgaaggtacgcagccgacacaacaggcagtgcacgaggtgggaacgaccattatcgataatggcgaggcacaggaattgttctgattaaaaaggcgcttcggcgccttttcagtttgctgacaaagtgcacttgtttatgccggatacggcgtgaacgcgttatccggctaacaaaatcgtgaaaactcaataaattgcagaaaccccataagcctgataaacattgtgcatcaggcaaacttcacgcatttacactcgcccctgccctttcaaccattcgcgcacgaggaacagcgcactgacattgcgcgcttcattgaagtcagggtcttccagccaatccatcatatgcgccagcggccagcgcacctgtggtagcggctctggctcatcgccttccagactttccgggtagagatcttgcgctaccacgatattcattttgctggaaaagtaagacggtgccatgctgagcttcttcaaaaaagtcagatcgttcgctccaaatccaacctcttcttttagctcgcggttagcggcttcgtagacgctttcacccggatcaattaatcctttgctaaaacctaattcgtaggattcagttcccactgcgtattcgcggatcaggatcaggtgatcgtccacaatcggcacaatcatcactgcttcccggttggttggacgcattcgttcataaacacgccgcacgccattgctgaactccagatccacgctctcgacggtaaacagtcgggaacgggctacagtttcaacattcagaatggtgggtttttgtaaacttttgctcatcgtgggatctatgctgtgaaatcagcggttattgtgcgatatcggacacgctttcggcaatgtgaattgcatgttatttacatttatgtaacttaataaataatcgtcctcaaatcaaattaaaagtcaataggttgaaataactccaggaatttgctgatattccgccttcagagggtttgctatgatcagcggttactgtgatgtgcttaatgatgctcaagttaaactccacgcttgccgatagccaaccgcagaatcatgtattgtgtccggtgcgactgaccacgcctgacagactaagtaagatggggaaagcatgagcaccattgtgatttttttagctgctttgctggcctgcagtctacttgcgggatggctgataaaagtgcgatccagacggcgtcagctgccctggaccaacgccttcgcggatgcgcaaacgcgtaaactcacacctgaagaacgtagcgccgttgaaaattatcttgagagcctgacgcaggtattacaggtgcctggcccaacgggagccagcgcggcaccgatctctctggcgctgaatgccgaaagcaacaacgtcatgatgctgacacacgctatcacgcgttacggcatctctaccgacgatccgaataaatggcgttactacctcgatagcgtagaagtccacctgccccctttctgggaacagtacatcaacgatgagaataccgttgaactgattcataccgatagcctgccgctggttattagtctcaacggtcatacgctgcaggagtacatgcaggaaactcgcagctatgccttgcaacctgttccgagtacgcaggcgagcattcgcggggaagagagtgagcaaatcgagctactcaatattcgcaaagaaacgcatgaagaatatgcgctgagtcgtccgcgcgggctgcgtgaagcgttgctgatcgtcgcctccttcctgatgttctttttctgcctgattaccccggatgtatttgttccgtggctggcaggcggcgcgttactgctgctgggcgcaggtctgtgggggctattcgcgcccccggcaaaatcctccctgcgggaaattcattgtctgcgcggtacaccccgtcgttggggattgtttggcgaaaacgatcaggaacagatcaacaatattagtctcggtattatcgacctggtctatcccgcacactggcagccatacattgctcaggatctcggtcaacaaaccgatatcgatatctatctcgaccgccatgtagtgcgtcagggacgatatcttagcctgcatgatgaagtaaaaaactttccgttacagcactggctgcgcagtacgattatcgctgcgggcagcctgctggtgctgtttatgctgttattctggatcccgctggatatgccgctgaaattcactctcagttggatgaaaggcgcgcagaccattgaagccactagcgtaaaacaactggctgacgctggcgtgcgggtaggcgatacattgcgtattagcggtacgggaatgtgtaatattcgaacttccggaacctggagcgcgaaaaccaatagtccttttttaccgtttgactgcagccagatcatctggaacgacgcccgcagtttgccattaccagaatctgaactggtcaacaaagcgacggcattgactgaagcagttaatcgccagctgcaccctaaaccggaagatgaatctcgcgtcagtgccagtttacgtagtgcaattcaaaaatccggcatggtattgcttgatgattttggcgacattgtactgaagacagcggatttatgttctgccaaagatgactgtgtgcgactgaaaaatgcgctggtcaatctcggcaacagtaaagactgggacgcgctggtaaaacgcgccaacgccgggaagctcgatggcgtgaatgtgttattacgcccggtgagtgcggaaagcctggataacctggtggcaacctccaccgcgccgtttatcacgcatgaaacggcgcgagcggcacaaagtctaaacagtccggcccccggcggattcctgattgtcagcgacgaaggcagcgattttgttgatcagccctggcctagcgcaagtctttacgactacccgccgcaagaacagtggaacgctttccagaaactggcacaaatgctgatgcatacgccgtttaacgccgagggtatcgtcacaaaaatcttcactgacgccaatggtacgcagcatattggccttcatccgatcccggatcgttccggcctgtggcgctatctcagcaccacattgctgctactgacgatgctgggtagcgccatttacaatggcgtacaggcctggcgtcgttaccagcgtcatcgcactcgcatgatggagattcaggcctattatgaaagctgcctgaacccgcaactgatcacccctagtgaaagccttatcgaataacacgtttgcgcggcaggttatgctaccctgtcgcgcaaattgcttcactctggagatttccctcatgcatatcaacattgcctggcaggacgtagataccgttctgctggatatggacggcacgttgctcgacctcgccttcgataactatttctggcaaaagctggtgcctgaaacatggggcgcgaaaacggggttacgccacaggaagcgatggaatatatgcgccagcaatatcacgacgtacagcatacgctaaactggtactgtcttgattactggagtgagcaactgggtctggatatctgtgcgatgaccaccgagatgggaccgcgtgccgtactgcgtgaagataccattccgtttcttgaggcactgaaagccagcggtaagcagcgaattttgctcaccaatgcgcatccgcacaacctggcggtaaaacttgagcataccggtctggacgcacaccttgatttattactttccacccacacatttggttatccgaaagaggatcagcggttatggcatgcggtggccgaagctacgggtctgaaagctgaaagaacgctgtttattgatgacagcgaagcgattctcgatgctgccgcgcaatttggtattcgttactgcctcggcgtgactaatcctgattccgggattgccgagaaacagtatcaacgccatccgagtctgaatgactaccgccgcctgatccccagcctaatgtgaaggagacgccatgaaagagaaacctgctgttgaggttcgactggataaatggctatgggctgcccgtttttataaaacccgcgcgctggcccgtgaaatgattgaaggcggtaaggtgcattacaacgggcagcgcagcaagccgagcaaaatcgtcgagctgaatgccacgctcactctgcgccagggaaatgacgaacgcacggtgattgtaaaggcgattactgaacagcgtcgccccgccagcgaggcagccttgctgtatgaagagactgcggaaagtgtagagaaacgcgaaaaaatggcgctggcacgtaaacttaatgccttaaccatgccgcacccggaccgacgcccggacaaaaaagagcgccgcgacctgttacgatttaaacacggcgacagtgaataactgtcacctgcaagagagatgattatgccgcaacatgaccaattacatcgctatctgtttgaaaactttgccgtgcgcggcgaactggtaaccgttagcgaaaccctgcaacagatccttgagaaccacgattatccgcagcccgttaaaaacgtgctggcagaactgctggttgcgaccagcctgttaaccgctacgctgaagtttgatggtgatatcaccgtacagctgcagggcgacggtccgatgaatctggcggttattaacggtaacaataaccagcagatgcgcggtgtggcgcgcgtgcagggcgaaattccagaaaatgccgacctgaaaacgctggtcggcaatggttacgtggtgatcaccattaccccgagcgaaggcgaacgctatcagggcgtagttggtctggaaggtgataccctggcggcctgcctggaagattactttatgcgttctgaacagctgccgacgcgcctgtttattcgcaccggcgacgtagacggcaaaccggctgcaggcggtatgttgttgcaggtaatgcctgcgcaaaatgcccagcaggacgactttgaccacctggcgacgctaaccgaaaccatcaaaaccgaagaactgctgaccttaccggcaaacgaagtgttgtggcgtttgtatcacgaagaagaggtgacggtttacgatccgcaggatgtggagttcaaatgcacctgcagccgtgaacgttgcgccgatgcgctgaaaacgctgcctgatgaagaagttgatagcatcctggcggaagatggcgaaattgacatgcattgtgattactgcggtaaccactatctgttcaatgcgatggatattgctgaaatccgcaacaacgcgtctccggcagatccgcaagttcattaatgagtatgtccggcagagagggctctgccggattttacgactaatacacctgatgcgctttgtcactcattcagattcacattcagcctttcaccatccactacaagatcgcgccacgctttaggcttcgtccccagttttccatccttcgcagctgtgagtaatttttctttcgttatttcgttcggaagtaaactcatatcaagcgcgtcccattcttttctgtcactgtcaaagccatagacaatgactctgtcatcattaaaagcaaacaggatccgctccgcctgaccatcactattcagatcttgctcgaccaggacgcaggcgtctttttcaatacaggtcatcacgttatagcgatcctggattaaggcgctccagaatgtcgcatcaggtttaacagaaccaggggcaattaacacattatcggctaatactttttcgcttacctgttgctgaagatgttgctctccatctaacgccatcagcagatcccgcgcgcgtttcgggtctttcataaacccggcatcgcttttcaggctctcaagcgcagcacgtccatagcgaccgctctgctcgagcatgtagatagttacctggtcactcgtgtttttgccgctctgataacgcgccatatggctgttcacgctaatgcgcatactgtccagcaccgggctattaagaagcaccagtatcaccaacaccaataagctaaccgcaaggttcactttgccctgaagaacaacgggattttgccctttacgccagacgatgctgacaaaataccccaggctccacaccagtaacaccagcaccgccagcacgccctgcaagcggtcgacagtccagccgtactgagcgacccgcagccataacgcccaggcggcgacgaacacatacagcggagcaaccagcaaagcggttttaatcaggcaacgcaacggccctgtccagggaagactcgctttttgcggatcgcggacaatagccattaagatcaattgcaaaaaggccagcgtcaacagcaacccggcggcggagatgtggcgagaaatcgcgctcaggcccgtaaacggcagggtgatgataaacatcagggttagcaaacttactaacggcagcaaccccgtggcgattaacgtgaacaacttttgaatagagtcgattaaacgactctgtgttcgcgcgaggatcaccgccagcgcggtaaccagacctaacgtgagataaataaaccagtcggttgcaaaaaagagcgtattgaaaaacgtgatgccaacaagtttaaacaactcactccacagtaaaagcaccagccacgtcaagccattggcgagaaaaatcaccagtaatataagtacgttatgccatacactctggtaaaaatagcgatagcggctactgtcattgcggatgcgaaggctttgttgtatccacggtagcaacaacattgccatcaacagcagatagcaaccaaaatcccaaagcgccttttcagctctccaggggttcatgccatcagtttgccacttcagccagccgctcatccccagcgtggcaataaacactagcgccagccatccccaaaggcgcttctgtttaaaagagatcacggagaagagtaaaacggaactaaacgcgacggtcgcaggcacgccataaacaatccaactgtgattttttccggaaagccaggcgatcagcaggtagcaaaccagaccctgaagtaatccggtagcaatcatcccccagcgtgttgcgggactaagttcaacgttatccatgttggttatccagaatcaaaaggtgggttaattatcgcatccgggcagtagtattttgcttttttcagaaaataatcaaaaaaagttagcgtggtgaatcgatactttaccggttgaatttgcatcaatttcattcaggaatgcgattccactcacaatattcccgccatataaaccaagatttaaccttttgagaacattttccacacctaaaatgctatttctgcgataatagcaaccgtttcgtgacaggaatcacggagttttttgtcaaatatgaatttctccagatacgtaaatctatgagccttgtcgcggttaacacccccaaaaagactttactattcaggcaatacatattggctaaggagcagtgaaatgcgcgttaacaatggtttgaccccgcaagaactcgaggcttatggtatcagtgacgtacatgatatcgtttacaacccaagctacgacctgctgtatcaggaagagctcgatccgagcctgacaggttatgagcgcggggtgttaactaatctgggtgccgttgccgtcgataccgggatcttcaccggtcgtagtccaaaagataagtatatcgtccgtgacgataccactcgcgatactttctggtgggcagacaaaggcaaaggtaagaacgacaacaaacctctctctccggaaacctggcagcatctgaaaggcctggtgaccaggcagctttccggcaaacgtctgttcgttgtcgacgctttctgtggtgcgaacccggatactcgtctttccgtccgtttcatcaccgaagtggcctggcaggcgcattttgtcaaaaacatgtttattcgcccgagcgatgaagaactggcaggtttcaaaccagactttatcgttatgaacggcgcgaagtgcactaacccgcagtggaaagaacagggtctcaactccgaaaacttcgtggcgtttaacctgaccgagcgcatgcagctgattggcggcacctggtacggcggcgaaatgaagaaagggatgttcagcatgatgaactacctgctgccgctgaaaggtatcgcttctatgcactgctccgccaacgttggtgagaaaggcgatgttgcggtgttcttcggcctttccggcaccggtaaaaccaccctttccaccgacccgaaacgtcgcctgattggcgatgacgaacacggctgggacgatgacggcgtgtttaacttcgaaggcggctgctacgcaaaaactatcaagctgagcaaagaagcggaacctgaaatctacaacgctatccgtcgtgatgcgttgctggaaaacgtcaccgtgcgtgaagatggcactatcgactttgatgatggtagtaaaaccgagaacacccgcgtttcttatccgatctatcacatcgataacattgttaagccggtttccaaagcgggccacgcgactaaggttatcttcctgactgctgatgctttcggcgtgttgccgccggtttctcgcctgactgccgatcaaacccagtatcacttcctctctggcttcaccgccaaactggccggtactgagcgtggcatcaccgaaccgacgccaaccttctccgcttgcttcggcgcggcattcctgagcctgcacccgactcagtacgcagaagtgctggtgaaacgtatgcaggcggcgggcgcgcaggcttatctggttaacactggctggaacggcactggcaaacgtatcagcattaaagatacccgcgccattatcgacgccatcctcaacggtagcctggataatgcagaaaccttcactctgccgatgtttaacctggcgatcccaaccgaactgccgggcgtagacacgaagattctcgatccgcgtaacacctacgcttctccggaacagtggcaggaaaaagccgaaaccctggcgaaactgtttatcgacaacttcgataaatacaccgacacccctgcgggtgccgcgctggtagcggctggtccgaaactgtaatgatttgaagctggagaatatctatccagtatcttatagaaagcaaaacgggaggcaccttcgcctcccgtttatttacccttcttttgtcgtgccctgcgcccgcgttaccggcactggcagccaggcgcgaatggaaagcccgccccgctcgctggtgccaagctccagcatcccgttatggttatccacgatacgctgcacaattgccagccctaatcccgtgccgctaatggtgcgcgcactgtcgccgcggacaaacggctggaacaggtgcttacgttgttccggcgcaattcccggaccgtcatcttccacctggaaccaggcgcgattcggctccgttccgctgctgactttgatccagccattgccataacgggcggcgttgaccaccatattcgccaccgcgcgtttgatgctcagcgggtgcattttcacttcaatgctgccggggtaaagcgcggtttcaatttcccgctcatagccactttcggcagcaatcacctcaccgagtactgcattaagatccgccatttccatcggcatctcctgcccggtgcgcaggtagtcgataaactgctcaatgatggcgttgcactcttcgatatctttattgatgctttctgccagatagccatcctgctcgctcatcatctcagtcgccaggcgaatacgcgtcagcggcgtgcgcaagtcgtgacttacccccgccatcagcagcgtgcggtcatccgccagttgcttaacaccagccgccatatggttaaaggcacgggtaacggaacgcacctcgctagcgccatactcacgcagcggcggcggaataatccctttaccaacctgcaaggctgcgtgttcgagatcgaccaacggtcggttctggatacgaataaacagccacgccccgcctatcgccaatagcataatcgccagcgtatagcggaacagcggagagaaatcgccctgatgaatttcggtcagcggcacgcgtacccagatattggggctcagccaggttttcagccagacgacagggctacttttgttgacctcaacgcgcacttccgtcgggccgcccagttgctgcgccatctgatggcttaagaattcatagtgttgcgcccaacgcagacctgcctcttcggcagcctcgttggagtagagagagatccccagctcacggtagatctcccgacggaaagcgggaggcacaaccaactgcgtgccgtcctccagttgcagtttgtcggtcatcaacatacgcacttcgtacgcgaggactttattaaactgctggaggctcggcaaaatcgcgaagttcagcaccaccagataagtcgtcaccaggctggcgaacagcaaggtgacgatgagcaataacgtacgggcaaaactacttcgtgggctgaagcgcaatcgcctcatgctttagagccgtccggtacaaagacgtagcccagaccccagacggtctgaatgtaacgcggatgcgctggatcttcttccaccatgcggcgcagacggctaatctgcacgtcgatggagcgttccattgcggaatattcacgaccacgggcaaggttcatcagcttatcgcgggagagcggctcacgcggatggctgaccagtgccttcagtaccgcaaactcaccgctggtgagcggcatcggctcgtcttcgcggaacatttcgcgcgtaccgaggttaagtttgaacttaccgaaagcaattaccgcctcttcctgactcggtgcgcctggcagttcgttcgcctgacgacgcagcaccgcacggatacgggccagcagttcacgcgggttaaacggttttggaatgtagtcgtcagcgccaatctccaggcctacgatacggtccacttcttcccctttcgccgtcaccataatgatcggcatcgggttgctctgactacgaagacgtcggcaaatgctcaagccatcttcaccaggtaacattaaatccagtaccataagatggaaagattcacgagtcagcaggcgatccatctgttctgcattagcgacgcttcgaacctggaagccttgttcggtgagataacgttccagcagcgcacgcaggcgcatgtcgtcatcgaccaccagaatcttgtagttctcttgcattgtttgtactcccaaaggttcgcaacaatttgtaagcgtgtattcttaaaaaagctcacgttcgtcaccagctaaatctggtatgaatttcagcctaaattgttacaaagcatattaaacagcagcttaagtatacaatttattcggcgaaacattattgattctgttgatatgatcacgttatacccaatgtgcgcattatcaaacagacaaagggaatcaacgagatgaaaacgcccctggttacccgggaagggtatgaaaaactcaaacaagagcttaattatctctggcgtgaagaacgcccggaggtcacaaaaaaggtgacctgggccgcaagtctgggcgaccgcagcgaaaatgctgactatcagtataataaaaagcgtctgcgtgaaatcgaccgtcgcgtgcgctatctcactaaatgcctggaaaatctcaaaatcgtcgattactcccctcagcaggaaggcaaagtcttttttggcgcgtgggtggagattgaaaacgacgatggcgtgactcaccgtttccgtattgtcggctacgatgaaatttttggccgtaaagattacatctctatcgattccccgatggcccgcgcattgctgaaaaaagaagtcggcgatctggcggtggtgaatacccctgccggggaagcgagctggtatgttaatgctatcgagtacgtgaaaccgtaaggaagagtcttaacctcctgccgatggctggcatttttgccagccagtccgtataactatcccctgatttttgatccgaaaagatgaactcaaaccatgatgaatgatagcttctgccgcattattgcgggtgaaattcaggcgcgcccggaacaggttgacgctgccgttcgcctgcttgacgaagggaataccgtgccgtttatcgcacgttatcgtaaggaaatcaccggcggtctggatgacacgcagctgcgtaatctggaaacgcgtctgagctatctgcgcgagctggaagagagacgtcaggcgatcctcaagtccatttccgagcaaggcaaactcaccgatgatctggcgaaggccatcaacgccaccctaagcaaaaccgaactcgaagacctctacctgccctacaaacctaaacgccgcacccgcgggcaaatcgccattgaagcagggcttgagccgttggctgacctgctgtggagcgatccgagtcacacgccagaagtcgccgctgcacaatatgtttatgccgataaaggcgtggcagataccaaagccgcgctggatggcgcgcgctatatcctgatggaacggtttgccgaagatgccgcgctgctggcgaaagtgcgtgattatctgtggaagaacgcgcatttggtttctacggtggtgagcggtaaagaagaggaaggggcgaaattccgcgactatttcgatcatcacgaaccgttgtccacggtgccttctcaccgcgcgctggcgatgttccgtgggcgtaacgaaggcgtacttcagcttagcctgaatgccgatccacagttcgatgagccgcccaaagagagctattgcgagcaaatcatcatggatcaccttggcctgcgcctgaacaatgccccggcggatagctggcgcaaaggcgtggtgagctggacgtggcgcatcaaggtgctgatgcatctggaaaccgaactgatgggcaccgtgcgcgaacgtgcggaagatgaagcaatcaacgtctttgcccgtaacctgcacgatctgctgatggcggcccctgccggactgcgtgcaacgatgggcctcgatccgggtctgcgtactggggtaaaagtggcggtggtcgatgccactggcaaactggtggcgaccgacaccatttacccgcacaccggacaggccgcaaaagcagcgatgaccgttgctgcgctgtgtgaaaaacataacgttgaactggtagcgatcggtaacggtacagcttcccgcgaaactgagcgtttctatctcgatgtgcagaagcagttcccgaaagtgaccgcgcagaaagtaatcgtcagcgaagcaggcgcgagcgtttacagcgcttccgagctggctgcacaggagttcccggatctcgacgttagcctgcgtggcgcggtgtctatcgcccgccgtttgcaggatccgctggcggagctggtgaaaatcgatccgaaatctatcggcgtaggtcagtatcagcatgacgtcagccagacgcaactggcccgcaaactggacgcagtagtagaagactgcgtaaacgccgttggcgtcgatctcaacactgcttctgttccgctgttaacccgcgtggcgggcctgacgcgcatgatggcgcaaaacatcgttgcctggcgcgatgagaacggtcagttccagaaccgtcagcaactgttaaaagtgagccgtctggggccgaaagccttcgagcagtgcgcgggcttcttgcgcattaaccacggtgataacccgctggacgcgtctaccgttcacccggaagcctatccggtggtggaacgcattctggcagcaacacagcaggcactgaaagatctgatgggtaacagcagcgaactgcgtaacctgaaagcgtctgactttactgatgagaaattcggtgtgccgacggtaaccgacatcatcaaagagctggaaaaaccgggtcgcgatccgcgtccggaatttaaaaccgctcagtttgccgatggcgtcgagacaatgaacgacctgcaaccgggtatgatcctcgaaggcgcagtgaccaacgtcaccaactttggcgcgtttgtcgatattggcgtgcatcaggacggcctggttcacatctctagtttgagcaacaagtttgtggaagatccgcataccgtggtgaaagcgggcgacattgtgaaggtgaaagtgctggaagtggatcttcagcgtaaacgtatcgccctgactatgcgcctggatgagcagcctggcgaaaccaacgctcgtcgcggcggcggtaatgaacgcccgcaaaacaaccgcccggcagccaaaccacgcggtcgtgaagcgcagcctgccggtaatagcgcgatgatggatgcgctggcggcggcaatgggcaaaaaacgttaaacgcccgtactggcctacggttcgaatttgcacgaaatcgtagggcagataaggcgttcacgccgcatctggcaacgaacgccttgcctgacataaaagtgccggagaatatctccggcatttttattccacagccaaactcataatatattccggcaatatttatcatttcattaacaactgaaaccttaattaaacattagccagtccgggtaattcactattcgaattatattttcgctgcgatataaccttgagccacatcaacattgagtcagattattattcaaaccaacattcgcacacattttaagtattgctgatagaaaccattctcattatcattgtgttgttgattatttaatctctcctttgttggcaaatcatctggtctcatgtcgctgtcaaacgccccatgaggtagttatccagttaatgagaaacaagtaggcacctatgcaatacactccagatactgcgtggaaaatcactggcttttcccgtgaaatcagcccggcatatcgccaaaaactgctttctcttggcatgttacctggctcctcttttaatgtggtgcgcgtcgctccactcggcgaccccattcatatcgaaacccgtcgtgtgagcctggtattacgcaaaaaagatctggccttattagaagtggaagcggtttcctgttaatacggtgataacaacaatgaaaaaattaaccattggcttaattggtaatccaaattctggcaagacaacgttatttaaccagctcactggcagtcgtcagcgtgtaggtaactgggctggcgttaccgtcgaacgtaaagaagggcaattctccaccaccgatcatcaggtcacgctggtggacctgcccggcacctattctctgaccaccatcagtagccagaccagcctcgatgagcaaatcgcctgtcactacattttgagtggcgacgccgacctgctgattaacgtggtggatgcgtctaaccttgagcgtaacctgtacctgacgctacaactgctggaactcggcattccctgcattgtggcactgaacatgctcgacattgccgagaagcaaaatattcgtattgaaattgatgctctgagcgcgcgtctgggctgtccggtgatcccgctggttagtacccgtggtcgcggtattgaagcgctcaagctggcgattgatcgctataaagctaacgagaatgtggaactggtgcattacgcacagccgctgctcaacgaagcagatagtctggcaaaagtgatgccttccgacatcccgctgaaacaacgtcgctggctgggcctgcaaatgctggaaggcgatatctacagccgcgcctacgccggtgaagcgagccagcatctggatgccgccctcgcccgtctgcgtaatgagatggacgatccggcgctgcacattgccgatgcgcgttaccagtgcattgctgccatctgtgatgtggtaagcaacaccctgacggcagaacccagccgtttcaccactgcggtagataaaatcgtgctcaaccgtttcctcggtctgccgattttcctctttgtgatgtacctgatgttcctgctggctatcaacatcggcggggcgttacagccgctgtttgacgtcggctccgtggcgctatttgtgcatggtattcaatggattggctacacgctccacttcccggactggctgactatcttcctcgcccagggcctgggtggcggcattaacaccgtgctgccactggtgccgcagattggcatgatgtacctgttcctctccttccttgaggactccgggtatatggcgcgtgcggcgtttgtgatggaccgtctgatgcaggcgctgggcttgccggggaaatcctttgtgccgctgatcgtcggtttcggttgtaacgtaccgagcgtaatgggtgcacgtacgcttgatgcaccgcgtgaacgtctgatgaccatcatgatggcaccgtttatgtcctgcggcgcgcgtctggctatcttcgcagtattcgcggctgccttcttcgggcagaacggtgcgctggcggtcttcagcctgtatatgctgggtattgtgatggcggtgctgactggcctgatgctcaagtacaccatcatgcgcggtgaagcgacgccgtttgtcatggagttgccggtctatcatgtaccacacgttaaaagcctgattatccagacctggcagcgtctgaaaggcttcgttctgcgtgctggtaaagtgatcatcatcgtcagcattttcctgagcgctttcaacagcttcagcctgagcgggaaaatcgtcgataacatcaacgacagcgcgctggcgtccgtcagccgggtgatcaccccggtcttcaagccaattggcgtgcatgaagataactggcaggcaacggttggcctgtttacaggtgccatggcgaaagaagtggtagtgggtacgctcaacaccctctacaccgcagaaaatattcaggacgaagagttcaatccggcagaatttaacctcggtgaagagctgttcagtgcgatagatgaaacctggcagagcctgaaagacaccttcagccttagcgtactgatgaaccccattgaagccagcaaaggcgacggcgaaatgggtaccggggcgatgggcgtgatggatcagaaattcggtagcgcagcagcagcttacagctacctgattttcgtcctgctgtatgtaccatgtatcagcgtgatgggggctatcgcccgtgaaagtagccgtggctggatgggcttctccatcctgtgggggctgaatatcgcttacagtctggcaacattgttctatcaggtcgccagctacagtcagcatccaacttacagcctggtgtgcattctggcggttatcctgtttaacatcgtggttatcggtctgctgcgccgcgcgcgtagccgggtggatatcgaactactggcaacccgcaagagcgtaagcagttgctgcgcagccagcaccaccggtgattgccattaatggctagtcttattcaggtgcgcgatttgctggcgttacggggccgtatggaagcggcccagataagccagacattgaacactccacagccaatgattaacgccatgctgcaacaactggaaagtatgggcaaagccgtgcggattcaggaagaacctgacggctgcctctctggcagttgtaaaagctgcccggaaggaaaagcctgtctgcgcgagtggtgggcgctgcgttaaccttactccatcgcctgttttggaaagcccggtatgcgtctgcatccgggcttttttgcgtgcggctttccataaaaatgcaactcttgcagcacggcgtaagttcctttgaaagcatctcgcagggatgaaaactcgctaatacacaggtgtggagtggcgcgtagagtcgcggcattcaaacaacaggtgaaggaacgccatgagcaaaaagcagagttccaccccacacgatgcgctgttcaaactctttttacgccaaccggacacggctcgtgattttcttgcgtttcatttaccggcacccattcacgcgctttgtgatatgaaaaccctcaagctggagagcagcagctttattgatgacgatctgcgtgaaagctattccgatgtgctgtggagcgtgaaaacggaacaaggaccaggatacatctattgtctgattgaacatcaaagcaccagtaacaaactgatcgcatttcgcatgatgcgttacgctattgccgcaatgcaaaatcaccttgatgctggatacaaaacgttgccgatggtggtgccattgttgttttaccacggtattgaaagcccctatccctatagcctgtgttggctggattgtttcgccgatcccaaactggcaaggcagctttatgcctccgcatttccgctgattgatgtcaccgtcatgcctgatgatgaaatcatgcagcaccgacgtatggcgctgctggagttaattcaaaaacatattcgtcaacgcgacctgatggggctggtagagcaaatggcctgcttattaagtagtggatacgctaatgacagacaaatcaaagggctgtttaattacatactgcaaactggcgacgctgtacgttttaacgattttatcgacggcgttgccgaacgtagtccgaaacacaaggagagtttaatgactattgcggaaagattgcggcaggagggggaacaatccaaagccctgcatatagccaaaataatgcttgaatccggagttcctcttgcagacatcatgcgctttaccgggctgagtgaagaagagttggctgcggcgagtcagtaaagttctgtctcgccatttcaaaagccacttacaccctctgcttcaacgccaccagcaggtgacaaaactcggccggatggctaataaatggcgcatgggccgctttggcgaagatataactttcgctgtgaggccaaagtttatccagcatcggcaccactttgcgcggcaccagaccgtcgagatagccatacaatcgcaaaaacggcatggacacgttttgcagcggctgacggagatcgaccgttttcaggatttccagcccgccattaagcacgtcaacctccggcatcggtaacgccagaacggttttcttcaacgcccgcgcatcctggcgcgccgtttcagtccccatggtttgtaacgccaggaaccgctccactgtacgctgaaaatcatcactgagttgctgctgaaatcccgccagcacgtccggttttatccccggccactcgtcacgagcactaaaacaaggactgctcgccacggtgaccagcgcctgaacacgctcgggatgggttaacgcaatctggcttgccaccagcccgcccagactccagcctaaccaaatggctttatcaggtgcctgttgcagcacggcttcggccatatcagcaagactcagcgcaccaaatccccggctacgcccgaagccgggcaggtcaacaaggtgcagcgtaaaatggctgctaagttcctcgtcaatgcaacgccacacttcggcattcagtccccatccgtgcagcagcacaagatgaacattcccctgacctttggtctgccaccagatgttattcatccgctattgttctcttttgacttacaaggatgaacatatgctaacagtaccgggattatgctggctatgccgaatgccactggcgttaggtcattgggggatttgtagcgtctgtagtcgcgccacccgcacagataaaacgttatgcccacaatgtggattacccgccacacactcccatcttccctgcggtcgctgcctgcaaaaaccgccgccctggcaaagactggtcacggttgccgactatgcgccgccgttaagtccgcttatccaccagcttaaattttcccggcgcagtgaaatcgccagcgccctgagtcgtctgttactattggaagtcttacacgctcgtcgcaccaccgggttgcaattgccggatcgcatcgtcagcgttccgttatggcagcggcgtcactggcgtcggggatttaatcagagcgatttgctgtgtcagccgttaagtcgctggttgcactgccaatgggatagcgaagccgtcacacgtacacgggccactgcgacccagcattttctcagtgcccggctgcgcaagcgcaacctgaaaaatgcctttcgtcttgaattgcccgtgcaaggtcgccatatggtgattgtggatgatgtcgttaccaccggaagtaccgtcgcagagattgcgcagttgcttttacgcaatggtgcggcggctgtccaggtctggtgcctttgtcgaaccttgtaaagcctcgatgatgggcgtattataaccaactaaaatagtcaactattaggccattactatgatccgtatttccgatgctgcacaagcgcactttgccaaactgctggcaaatcaggaagaagggacacaaatccgcgtatttgtgattaaccctggcacgcctaacgctgaatgtggcgtttcttattgtccgccggacgctgtggaagccaccgacacagccctgaaatttgacctgctgaccgcgtatgttgatgagttaagcgcaccatacctggaagatgcagagatcgattttgttaccgaccagttgggttcccagttaacgctgaaagccccgaacgccaaaatgcgtaaagtggcagacgatgcaccgctgatggagcgcgtggagtatatgctgcagagccagatcaacccacagcttgctggtcacggtggtcgcgttagcctgatggaaatcaccgaagacggttacgccattctgcaatttggcggtggctgtaacggttgttccatggtcgatgtgacgctgaaagaagggatcgagaagcagctgctgaacgaattcccggagctgaaaggtgtgcgcgatctcaccgaacaccagcgcggcgaacactcctactactaagttatcccctcttttgtagattgcccgatgcgacgctaaagcgtcatttcgggcctacgttgaacatgtgccagacgttggcgcagcattgctttgtcaaatcctcggttcgtttccccgcgataatatgaccaacctctcataatttaaatttaccccgctctggtgattctcaaacgccagatgttacccgtatcattcacatgggtaccaaacatactcctgacatctgactacaataattagttttagtgggtatcagtcgtggtgccgcaatatctctgttcccgattgggataattagagtttgtcgtcagaaaattgacgttacccataacaaatgaaaggccaggtaaatcatgccattagtcattgttgctatcggtgtaatcttgttgttgctcctgatgatccgcttcaaaatgaacggcttcatcgctctcgtcctcgtggcgcttgctgttggattaatgcaaggaatgccgctggataaagttattggctccatcaaagccggtgtcggcgggacgctcggtagccttgccctgatcatgggttttggcgcaatgctgggcaaaatgctggcagactgcggtggcgcacaacgtatcgccaccacgctgattgccaaatttggtaaaaaacacatccagtgggcggtggtactgaccggttttaccgttggttttgccctgttctatgaagtgggctttgtgctgatgctgccgctggtgtttaccatcgcggcttctgcgaatattccactgctgtatgttggtgtaccaatggcggctgcactgtctgtgacccacggcttcctgccaccgcatccgggtccgactgcgattgccaccattttcaatgccgatatgggtaaaaccctgctgtacggtactattctggcaatcccgaccgtgattctcgccggtccggtttacgctcgcgtgttgaaaggtatcgataagccaattccggaaggtctctacagcgcgaaaaccttcagcgaagaagagatgccgagctttggcgtcagcgtctggacctctctggtgccggtagtactgatggcgatgcgtgcgattgccgaaatgatcctgccgaaaggtcacgctttcctgccggtagcggagttcctcggtgacccggtaatggcaacgctgattgccgtgctgattgcgatgttcacctttggtctaaaccgtggtcgtagtatggatcagattaacgacacgctggtttcttccatcaaaatcattgcgatgatgctgttgatcatcggtggtggcggtgcgttcaagcaggtgctggtagacagcggcgtggacaaatacattgcttccatgatgcacgaaaccaacatttctccgctgctgatggcctggagcattgctgccgtactgcgtatcgcgctgggttccgcaaccgttgcggcaatcactgcgggtggtatcgcggcaccgctgattgcaacgacgggtgttagcccggagctgatggttattgcggttggttccggtagtgtgattttctctcatgtgaacgatccgggcttctggctgttcaaagagtactttaacctgactatcggcgagaccatcaaatcctggagcatgctggaaaccattatcagcgtgtgcggtctggtaggctgtctgctgctgaatatggtgatttgataacactgactgccggatgcggcgtgaccgccttatccggcctacgattcgggatgaattagtaggccggataagacgcgtcaagcatcgcatccggcatcaaccgcactttacttcttcttcgctgcagctctgcgccgtctgtccaaatccttcagcaacttgttcacgccatcatcggcaaacatgctctcaagcgttgcggaaagcttgcgtcgccagtttttatactggtaactggtgccaggaatattcaccggttcggccatatccagccagtcttccggctgtagtcctaacagagcactgttactgtcggcaatgtagcgctgcaaaccacggttcagcgtcggcgtcatgctcatcaagcttgccttatgcccggcacgtttcggcagacaaccatatttatgcagtgcatccagcagcccttgcttcgccagttcgcgatcctgatacagaccgcgcagtaccacttcatccggatacagccccagggttttgcccagcgttagatccccgcactcccagtaaccgcgcagcgttggcaggtcatgtgtcgccgcaaccgccatgctctgctccggatacgctttcggtgcacggaacgtcttctcgtggtcgttttcgaaatagagcactttgtaagagtacacaccgctgctgcgcagcttaccgacaatctctaccggtacggtaccgagatcttcaccaatcaccatacagcgatgacgtttactttcgagtgccagaatgctgagcagatcatccaccggatagtgaacatacgcgccctgatctgccgtctcgccatacggtatccaccacaaacgcagcatgctcatcacatggtcaattcgtaatgcgccgcagttttgcatattggcacgcaacagctcgataaacggttcataggcacgcgcggtgatgatatgcgggtccattggcggtaatccccagttctgccccaacgggccgaggatatccggcggcgcgccaacgcttgctttcaggcaatatagttcacggtcacaccaggtttccgccccaccttccgctacgccaaccgccagatcacgatacaagccaatcggcatttcatagccctggcttatctcccagcaggcggcaaactggctgtaagccagccactgcaaccagagataaaaatcgacgtcatcacgatgttcttcgcagaactgacgcacttctggactatccacgttctgatacatctctggccatgcaggccagccccagcgcatttcgtcctctttcacttgctgggcatgtagcgcatcaaaggctgcctgccagaacaggctgtcgccctgctctgcaacaaactggcgaaacgcggccatctgctcatcatcacgttgcgcgaaacctttccacgccattcgtaatgctgtcatttttagggcggtaaccgtggagtaatcgacccagtcggcatcgcgcgcctgttgcagcgtctgttgcgtggtcggcaactgccaccaggcctgagcctcttcgctaagatggaaatcttcaacggcgttaacgtcgatataaatcacattcagccaacggcgagaagacgggctgtatgggctggcgctctccggatttgccggatagagcgcatgaatcgggttcaggccaatgaagctcccgccacgttttgccacatccaccagcatcgctttgagatcgccaaaatccccaataccccagtttttttcgcttcgcagcgtataaagctgaacgcaggcaccccacagcttttgtttattcagcaacgcctgcggttcgtaacagcgtttcggggcgacaatcacccggcaatgcgcgcgctggtcgtcctgggtgagtgtcagcgtgtgataaccttccggcagcttcgtcggtagattgaacgctttgccccccgttacatggcctttgtactgcgttccttcttcggtggtcagcagccagctatattcgccgctgccctccaccaccatcggcatttttttgccgctggtataaaccatgacattcgggactggcgttaccgccactttcgtggcggtacgttgatgcatcgcgtcaagcaaacgccgtttggtttcggcgctaatgctctgcggtttaccgtgggcattgatgtaattggggctaatccccgccgccagcgcggcattatccagacgtttgctttccatcgagcttccttagcgttttgcctgccagatacgagcctgataatcgcgaatagagcgatcgctgctaaacataccgcagcgggcggtattgaggatcgccgcgcgagtccaggcctcctggtcgcggtacagcacatccacctgcttttgtgcctctacataggctgcgaaatccgccatcaccagatacggatcgccgccctgtttgccgatactgtgcagcatctagtcgaaggcatgcttatcgccgtcgctgtatttaccgctttccagctctttcaatactgcgtccagcaccttatctttcttccgccatttcaccgggtcgtagcctttggccagaattgccttcacttgttccacggtatgaccaaaaataaagatattttcttcaccgactttctcggcgatttcaacgttcgccccatccagcgtaccgacagtaagcgcaccattgagcgccagtttcatattgccggtaccggaagcttctttacctgcagtgctaatttgttcggagatatccgccgccgggatcagtttttccgccgcgctaacgcaataatccggcaggaacaccaccttcaacttatcgccaaccagcggatcgttgttgatcacgtcagccactttgttgatcgcaaagataatattcttcgccaggtagtagcccggtgccgctttcgcgccgaagaggaagacgcgcggtacgcgatcagcctgcgggttttcacgaatttctttgtacaacgccagaatatgcagcagattcaggtgctggcgtttgtactcatgcaaacgtttgatctgaatatcgaaaatcgcctgtggattgatctcaataccggtacgaactttcacaaactccgccagacggactttattcgcctgcttgatctcgcgatattgctgacggaatttcgcatcatcagcgaatttttccagattgatcagctgatcgagatcgttagcccactctttttgcagacttttatccaacagagccgccagtgccgggttgcactgtttgatccagcgacgtggggtaataccgttggtgacgttatggaatttgttcggccatagctggtgatattccgggaacagatctttcaccaccagatcgctgtgcagcgccgcaacaccgttcaccgcgaaaccgccaaccacacacaggttcgccatatgcacttgtttgtcgtgcaccaccgccagtttggcccacactttttcatcgcccggccaggttttctctaccagcgttttaaagcgagtattaatttcgttaataatctgcatgtggcgcggcagtaagcctttcaccagtttcacatcccagcgttccagcgcttctggcatcagggtatggttggtgtaagcgaaagttttgctggtaatggcccaggcgtcatcccagctcatctggtgctcatcgatcagcacgcgcagcagttctggaatcgcgatagttgggtgggtatcgttcagctgaataacttcgtaatccgccagttcgtgcagtttacgccccgccagatgatggcgacgcaaaatatccgctacgctacaggcacactggaagtattgctgcatcaggcgcagctttttaccggcagtatggttgtcgtttggatagagaactttggtcagtttttccgcattgatgccctgctgttcggcacgcaagaaatcaccgtcgttaaatttagtcagatcaaacggatgcgcgtgcgtcgcctgccacagacgcagcggctgcgccacgccattacgatagccgacaacggggagatcccacgcttgaccggtaatggtaaactccggctcccagcgtccgtctttcgtcactttaccgccaatccctacctgcacatccagtgcttcgttgtggcggaaccacgggtagttactgcgatgccagtcatccggcgcttcaacctgtttgccatcgacaaaagactggcggaacaaaccatattgatagttcagaccgtaacccgtcgcagactgaccgacagttgccatactgtcgaggaagcacgccgccagacgtcccagaccaccgttacccagcgccgggtcgatctcttcttccagcaggtccgtcagattgatgtcataagccttcaagctatcctgtacatcctgataccagccgagattcaacaggttgttgcccgtcaggcgaccaatcaaaaactccatactgatgtagttaacatgtcgctgattcgccaccggcttggcgaatggctgagcacgcagcatttcggccagtgcttcactcactgctagccaccactggcgaggagtcatttcagccgcagaatttaagccataacgctgccactgacgactaagcgcttcctgaaattgcttatcgttaaaaataggttgactcataggagttccacttttcttagattttcaacacaacgttatcgctagtttgccaggctcgatgttgaccttcctcatcctgcgggggattaggcagggaggagttgcggggatgagcaaggaaatgtgatctcaaccacttaaagctagtgcaaaccacaggattagcatcaaatcaatgcaatacagcgcagaaaatctgtatctaagtgcaaaaaatggccgttgcgtattttcaaaaagcggaaggtaactctataaattaagtaaaggagtgaaacagtttcataagtaaaatatccagtgtgctccatctcattcttaatagatttattaagatcatctttttagatggcactttcatcaggaatgaagaagaaacccttgcttaaatgaatctgatgaacataagggaaaccagtattcacgctggatcagcgtcgttttaggtgagttgttaataaagatttggaattgtgacacagtgcaaattcagacacataaaaaaacgtcatcgcttgcattagaaaggtttctggccgaccttataaccattaattacgaagcgcaaaaaaaataatatttcctcattttccacagtgaagtgattaactatgctgattccgagtaaactaagtcgtccggttcgactcgaccataccgtggttcgtgagcgcctgctggctaaactttccggcgcgaacaacttccggctggcgctgatcacgagtcctgcgggctacggaaagaccaccctcatttcccagtgggcggcaggcaaaaacgatatcggctggtacagcctggatgaaggtgataaccagcaagagcgtttcgccagctatctcattgccgccgtgcagcaggcaaccaacggtcactgtgcgatatgtgagacgatggcgcaaaaacggcaatatgccagcctgacgagtctcttcgcccagcttttcattgagctggcggaatggcatagcccactttatctggtcatcgatgactatcatctgatcactaatccagtgatccacgagagtatgcgcttctttattcgccatcaaccagaaaatctcaccctggtggtgttgagtcgcaaccttccgcaactgggcattgccaatctgcgtgttcgtgatcaactgctggaaattggcagtcagcaactggcatttacccatcaggaagcgaagcagttttttgattgccgtctgagtagcccgattgaagccgcagaaagcagtcggatttgcgatgacgtttccggttgggcgacggcactacagctaatcgccctctccgcccggcagaatacccacagtgcccataagagcgcacgccgcctggcgggaatcaatgccagccatcttagcgattatctggtcgatgaggttttggataacgtcgatctcgcaacgcgccattttctgttgaaaagcgccattttgcgcagtatgaacgatgccctcatcacccgtgtgaccggcgaagaaaacgggcaaatgcgcctcgaagagattgagcgtcaggggctgtttttacagcggatggatgataccggcgagtggttctgctatcacccgctgtttggtaacttcctgcgccagcgctgccagtgggaactggcggcggagctgccggaaatccaccgtgccgccgcagaaagctggatggcccagggatttcccagcgaagcaattcatcatgcgctggcggcaggcgatgcgctgatgctgcgcgatattctgcttaatcacgcctggagtctgttcaaccatagcgaactgagcctgctggaagagagccttaaggccctgccgtgggacagcttgctggaaaatccgcagttggtgttattgcaggcgtggctgatgcaaagccaacatcgctacggcgaagttaacaccctgctagcccgtgctgaacatgaaatcaaggacatcagagaagacaccatgcacgcagaatttaacgctctgcgcgcccaggtggcgattaacgatggtaatccggatgaagcggaacggctggcaaaactggcactggaagagctgccgccgggctggttctatagccgcattgtggcaaccagcgtgctgggtgaagtgctgcactgcaaaggcgaattgacccgcagtctggcgctaatgcagcaaaccgaacagatggcacgccagcacgatgtctggcactacgctttgtggagtttaatccagcaaagtgaaattctgtttgcccaagggttcctgcaaaccgcgtgggaaacgcaggaaaaagcattccagctgatcaacgagcagcatctggaacagctgccaatgcatgagtttctggtgcgcattcgtgcgcagctgttatgggcctgggcgcggctggatgaagccgaagcgagcgcgcgtagcgggattgaagtcttgagctcttatcagccacagcaacagcttcagtgcctggcaatgttgattcaatgcagcctggcccgtggtgatttagataacgcccgtagccagctgaaccgtctggaaaacctgctggggaatggcaaatatcacagcgactggatctctaacgccaacaaagtccgggtgatttactggcaaatgaccggcgataaagccgccgctgccaactggttgcgtcatacggctaaaccagagtttgcgaacaaccacttcctgcaaggtcaatggcgcaacattgcccgtgcacaaatcttgctgggcgagtttgaaccggcagaaattgttctcgaagaactcaatgaaaatgcccggagtctgcggttgatgagcgatctcaaccgtaacctgttgctgcttaatcaactgtactggcaggccggacgtaaaagtgacgcccagcgcgtgttgctggacgcattaaaactggcgaatcgcaccggatttatcagccattttgtcatcgaaggcgaagcgatggcgcaacaactgcgtcagctgattcagcttaatacgctgccggaactggaacagcatcgcgcgcagcgtattctgcgagaaatcaatcaacatcatcggcataaattcgcccatttcgatgagaatttcgttgaacgtctgctaaatcatcctgaagtacctgaactgatccgcaccagcccgctgacgcaacgtgaatggcaggtactggggctgatctactctggttacagcaatgagcaaattgccggagaactggaagtcgcggcaaccaccatcaaaacgcatatccgcaatctgtatcagaaactcggcgtggcccatcgccaggatgcggtacaacacgcccagcaattgctgaagatgatggggtacggcgtgtaagtttagccggataacgcgccagatccggcttacatctctgcatcattcaatgctcacccgcgttacgccatctgtttctatcaaactaaaccgcaccggcaagaaacgctccaccaccgcgatattggtcagcagatggcaactgggatgggcgaccgtaaattcccccgcgcccgccagcgccatcggtagcaccagttggtcagcaagatattcccccaccgccgccgtgcttgccaggtagcgtttcacctctttcaccaactgtgccgcaaccacctcggcactgacgcgcttttcaccgacgacaaaaaagcgttcggtgatattttcactttcgacttcaaggctgacggtattacccggcccctggtcgcgcggcaggttatgaatattctgttcatgcagggaaaaactccccgccagtgtagcgatttcacgctcagcaacatggcgcggcacaccagctaatagaacttctccacgcatctgcacaatgttcccgcgctcgccaagttgcaaggtgttaaagcttgccacggggctgacttccgttgccaccacaccgcctccggcagggtaaaaaccgtggcgtaacagcgtggtttgctgatgaattcctattttcgccagcagcggctccagcacccggcggataaaatccgcaggcggcgcgctcgggttatcggtgccgccgctcacttcaacacggctaggtccatcggcaaaccacagcgcgggcagcaccgtttgcagcaccagcgtacaacttccggcgctaccgatagcaaagcggtaatcgccgccgcgcacggtgccgggccggaagagcagacgctggctccccagctccgcgccttccacggttgctccgcaaatttccgtcgccgcctttaccgcggtcagatgctggcgcaacagccccggtttcgcccgcccggcacgaatgctggtgatggtaaatggctggccggttatcatgctcaggctcagcgcgctgcgcaggatctgcccgccaccttcgccctgtgcgccatccagcgcaatcatccttttcatcatttatccttttacgcacaccacctgacgcagggtatagataacttccaccagatcgctttgtgccgccatcaccgcatcaatatctttatacgccatcgggatttcgtcgatcacttcggcatctttacggcattccacatgcgcggtggcacgaatttgatcttccacgctgaacagttttttcgctttagttcggctcattacccgcccggcaccgtggctgcagctacagaagctctcttcatttcccagcccacggacgataaagctttttgctcccatgctaccgggaataattccatattgaccagcacgcgcagacaccgcgcctttacgcgtcacgtagatctcttcaccaaagtgctgttctttttgcacatagttgtggtgacagttgatctcttccatcgccagcgtttgtggctgtctgaccgttttctgcgtaatgctctgcaatgccgttaccacgttttccatcatcgcatcgcggttaaggctggcaaaaagctgcgcccaggccacggctttcaggtaatcatcaaagtattccgtaccttccataaagtacgccagatcacggctcggcaacgtctcaagcgtttcctgcatctctttttgtgccagatcgataaagtaagtcccgatggcgttaccaattccgcgactaccggagtgcagcataatccacacctggtcgctctcatcaaggcagatttcaataaagtggttaccggttcccagcgttcccaggtgtttatagttattggtattcaggaaacggggatatttttgcgttaaccactgataaccggcttcaagctcagcccatttagcatcgacgttaacaggtggattttcccaggcacctttatcacgtttacaacggccagtggtacgcccgtgcggcacggccgtttcaatcgcctgacgcagctctgccaggttttcaggcaggtcttccgccgttaacgcggtacgcagcgcgttcattccacagccaatatccacgcccaccgccgccggaataatcgcccctttggtcgggatcacgctaccaatggtggaacctttacccaggtgtacatcaggcattaccgcaatatgtttgaaaataaacggcatcttcgccgtattaataagttgctgacgcgcatcggcctctaccggcacgcctttggtccacatttttaccggggcattttcagtggtcagtaattcgtaattcattttgtttttctcttttcgttgtttgctgtcctgataattgcaaccgtcgtgccagaaaattaaataagcagcttaattttttaattcattgttttaaaaaagattatatctttacgtccgtaaccggagatttcccgcaaagccaatttaccgataatgaaatatcgtcttttataaggatatctaagatgcgtaaaacagtggcttttggctttgtcggtaccgtactggattatgccgggcgcggcagtcagcgctggagtaaatggcgtccgacactctgtttatgccagcaagaaagcttggtcatcgatcgactggaattgttgcacgacgcccgcagccgcagcctatttgaaacgcttaaacgcgatatcgccagtgttagcccagaaacagaagtggtgagcgttgagattgaactgcataacccgtgggatttcgaagaggtctacgcctgcctgcatgatttcgcccgtggttacgagtttcagccagaaaaagaagactatttaattcacatcaccaccggtacccacgtcgcgcagatttgctggtttctgctggcagaagcgcgttacctgcccgcccggctgatacaatctagtcctccgcgcaaaaaagaacagccgcgcggcccaggtgaagtaacgattatcgatctcgatttaagccgttataacgccatcgccagccgctttgccgaggaacgccagcaaacgcttgattttcttaagtccggcattgccacgcgtaacccccacttcaaccgcatgattgagcagatcgaaaaagtggcgatcaaatcccgcgcgccgattctgcttaacggtccaaccggcgcgggcaagagttttctggcgcgacgcatcttagagttaaaacaggcgcggcatcagtttagcggcgcgtttgtggaagtgaactgcgccaccctgcgcggcgataccgccatgagcacgctgtttggtcatgtaaaaggcgcgtttaccggggcgcgggaatctcgtgaaggtttattacgcagcgccaacggcggaatgttgtttcttgatgagattggcgaactgggcgcagacgaacaggcaatgctgctgaaagccattgaagagaaaaccttttacccgtttggcagcgatcgccaggtgagcagtgattttcagcttatcgccggaacggtgcgcgatttgcgccagctggttgccgaaggcaaatttcgcgaagatctgtacgcgcggatcaatctctggaccttcaccctgccgggtctacgccagcgccaggaagatattgaaccgaacctggattatgaagtggagcgccacgccagtctcactggcgacagcgtgcgttttaacaccgaagcgcggcgcgcctggttggcttttgcgacctctccccaggcaacatggcgcggtaactttcgcgaactttctgccagcgtcacgcggatggccacctttgccactagcggacgcatcactctggacgtggttgaagatgagataaaccgtctgcgctataactggcaggagagccgcccctccgcgcttacggcgttgctgggcgcagaggcagaaaacatcgatctcttcgaccgtatgcaactggaacacgttatcgctatctgccgccaggcaaagagcctttccgcagccggacgccagctttttgacgttagccgccagggcaaagccagcgtcaatgacgcggatcggctacgcaaatacctggcgcgttttggtctgacgtgggaagccgtgcaggatcagcacagctccagttgaatatggtggtccgtcagcacctgcatcacgcttactggcggcggggcgtcggtgtagacggcatctaccatgctgatgctgcccatattgaccatcgcgttacggccaaatttcgagtgatcgacaaccagcataacgtggcgcgagttctcaataatggcgcgtttggtgcgaacttcgtggtaatcgaactccagcagcgagccgtcgctatcgatgccgcttatccccagaatgccgaaatcaaggcggaactgggagataaaatcgagcgtcgcttcgccaatgatcccgccatcgcggctgcgtaattcgccaccggcgagaatgatgcgaaaatcttcttttaccatcaacgtgttagcaacgttgagattgttggtgacaatgcgcaaattgctgtgattgagcagtgcgtgcgctaccgcttccggcgtggtgccgatatcgataaacagcgtcgagccattggggatttgctccgccactttgcgggcgatgcgctctttttcttcggtctgggtggccttgcgatcgtgccacggcgtgttaaccgaactggaaggcagcgccgcaccgccatgatggccaggatcaggttttgctccgccagctcattgaggtcgcggcgaatagtctgcgggctgacggagaaatgctctaccagctcttcggtactgacataaccctgctgtttaaccagttcgataataccgttgtgacgttgtgtttgtttcatttataaatccctggaattattttcgttttcgcgcattgaggctatcaacaaaagccatcgctaaacccacggctaacccggcgatgtgtgctccgttcgccatgctcatcccaaacaaatcaaaccatccggcgacaatccagatcagcgcaaagataattaacccacgttgcaggtaaatgccactttgcggatcgcgttcgccacgtagccagacgtagcccatcagcgcatacaccacgccagaaagcccgccaaaccacggcccgctgaatttttgctgcacatagccgcttaacagggcgctgataagcgtaatgacaattagcttaccgctaccgaggcgtttttccaccgcaccgccgagataccaccaccagagcaggttaaagaggatatgcatcaggctgaagtgcattaacgcgtgggtgaagtaacgccagaactcaaatttcagtgttggatcgaatggccaggccagccataacatcacttcctgatcgccgagaatttgcatggcaataaacaccaccacgcaggcgatcatcatcacccaggttaccggacctgcgcgttcacgcaaggcggcaaagaaaggataacggcgataatgcaggccactgccggtatggcctgcctgccagctcgccgccagataacgcggatctgccgggttttcgagaaaacgcgccagctccgcccgtacgcgctcggcctgggactcatccgccagccagacatcgctttggttatgttgttgaatcgtgaggataacaccctgcgtcgccatgtaatcaacaaacgcctgcgccacgcgggggttagcaaaagaggtaatcatcaacatcgttgctgtcgcttattccacacaaaaggggacagtataaagcgttacgcgccgtacgccacctctgcgggaaactgacgttgccaggcttcaaagccgccgtcaatgctatagaccacatcgtagccctgttgcagcagatactgcgccgcgcctttgctgctattgccgtgataacacatcaccatcaccggagtgtcaaagtcgttatcacgcataaaagcgcccagcgtgtcgttggttaaatggaaagcctgcaccgcatgtcccattgcgaaactctgtggatcgcgaatatcgaccagcaccgcctctttttcctgcaacttctggtgcgcgtcggcaacgttaatacattcgaactgatccatgcgtctctctttctttacaaacaagtgggcaaatttaccgcacagtttacgtcgaagcggcagataaacgccataatgttatacatatcactctaaaatgttttttcaatgttacctaaagcgcgattctttgctaatatgttcgataacgaacatttatgagctttaacgaaagtgaatgagggcagcatggaaaccaaagatctgattgtgatagggggcggcatcaatggtgctggtatcgcggcagacgccgctggacgcggtttatccgtgctgatgctggaggcgcaggatctcgcttgcgcgacctcttccgccagtagtaaactcattcacggtggcctgcgctaccttgagcactatgaattccgcctggtcagcgaggcgctggctgaacgtgaagtgctgctgaaaatggccccgcatatcgccttcccgatgcgttttcgcctgccacatcgtccgcatctgcgcccggcgtggatgattcgcattggtctgtttatgtacgatcatctgggtaaacgcaccagcttgccgggaagtactggtttgcgttttggcgcaaatagtgtgttaaaaccggaaattaagcgcggattcgaatattctgactgttgggtagacgacgcccgtctggtactcgccaacgcccagatggtggtgcgtaaaggcggcgaagtgcttactcggactcgcgccacctctgctcgccgcgaaaacggcctgtggattgtggaagcggaagatatcgataccggcaaaaaatatagctggcaagcgcgcggcttggttaacgccaccggcccgtgggtgaaacagttcttcgacgacgggatgcatctgcctagcccttatggcattcgcctgatcaaaggcagccatattgtggtgccgcgcgtgcatacccagaagcaagcctacattctgcaaaacgaagataaacgtattgtgttcgtgatcccgtggatggacgagttttccatcatcggcactaccgatgtcgagtacaaaggcgatccgaaagcggtgaagattgaagagagtgaaatcaattacctgctgaatgtgtataacacgcactttaaaaagcagttaagccgtgacgatatcgtctggacctactccggtgtgcgtccgctgtgtgatgatgagtccgacagcccgcaggctattacccgtgattacacccttgatattcatgatgaaaatggcaaagcaccgctgctgagcgtattcggcggtaagctgaccacctaccgaaaactggcggaacatgcgctggaaaaactaacgccgtattatcagggtattggcccggcatggacgaaagagagtgtgctaccgggtggcgccattgaaggcgaccgcgacgattatgccgctcgcctgcgccgccgctatccgttcctgactgaaagcctggcgcgtcattacgctcgcacttacggcagcaacagcgagctgctgctcggcaatgcgggaacggtaagcgatctcggggaagatttcggtcatgagttctacgaagcggagctgaaatacctggtggatcacgaatgggtccgccgcgccgacgacgccctgtggcgtcgcacaaaacaaggcatgtggctaaatgcggatcaacaatctcgtgtgagtcagtggctggtggagtatacgcagcagaggttaagcctggcgagctaaattaacgtaaggtgatcaggtcagatttcaatctggcctgagactgatgacaaacacaaaactgcctgatgcgctacgcttatcaggcctacgtggtttatgcaatatattgaatttgcatggtcttgtaggccagataagacgttcacgtcgcatccggcatgaacaaagcgcactttgtcaaaaatctaacctactttttaattcagggaattaccgcaaagcccacgccatcatacccaacgtaacaaaactcaggcacgttccccactcgcccgctgaaaaatagcattaatgcgcccagcgccagcataaaaattttgagcagaaggtaaattgttggcgtgataaggatattacaaacttcaataataccggcaagtccgacacccagcatggcaataaccaccgccaaaaattgcgccagtatggggatgccgaaaaaagtcattaccaggctggtcaaaatccattttctgttttgcattattctttccattctttttgaatggtgaaattatactccccgagtccccttgccccttctggacacttttccgaaatgatggcggaaaaaaacgggaccctttggccccgttctatttattggtgaacttacaatctcaccggatcgatatgccagatatgatcggcgtactctttgatagtacggtcagaagagaagtagcccatattggcaatgttcagcatcgcttttgcggtccactcttcctgaagctcgtagagttcatcgactttatcctgacaatcgacatagctgcgataatccgccagtacctggtagtgatcgccgaagttgatcaggctatcaaccagatcgcgatagcgacccggatcttccggactgaatacaccgctgccgatttgcgtcagcacctgatgcagctcctcatctttctcgtagtattcacgcggtttgtagccctgacgacgcagttcttccacttcttccgctgtgttaccaaaaataaagatattgtcagcaccgacatgatccagcatctcgacattcgcaccgtccaacgtaccgatagtcagcgcaccgttaagcgcaaacttcatgttactggtgccggaagcttccgtccctgccaggctaatctgttcagacagatctgccgccggaatgatcaactgcgccaggctaacgctgtagttcgggatgaacacgactttcagcttatcgccaatctgcggatcgttgttgatcactttcgctacgtcattgatcaaatgaataatgtgcttcgccatgtaataggcgctagccgccttaccgccaaaaatattcacgcgcggtacccacttcgcatccgggtcggccttgatgcggttatagcgggtaatcacatgcaacacattcatcaattgacgtttgtattcgtgaatacgtttgatttgtacatcgaacaacgcctttggattcaccaccacattcagctgctgggcgatatactctgccagacgctttttgttctccagcttcgcctgatgcacagcgtgattaaccattgggaaatcacagtgttgttgcagctcattaagcaggctaaggtcggtgcgccagttacggcccaggtgttcgtccagcacggcactaaggcttgggttcgctaccgccagccagcgacgcggcgtcacaccgttggtgacgttggtgaaacgacccgggaagattttcgcaaagtcggcaaacaagctttgcaccatcagattagagtgcagttcgcttacaccgttaactttgtggctcacaacaaccgccagccaggccatacgcacacgacgaccgttggattcatcaatgatgctcgcccgtcccagcagatcggtatcgttcggatactgttcctgcaaggttttcaggaaatagtcgttgatttcaaagatgatctgcaggtgacgcggcagaattttacccagcatatcaaccggccaggtttccagcgcctcgctcatcagcgtgtggttagtgtaggagaagacctgacaacacacctcaaacgcgtcgtcccagctaaattggtgctcatcgatcagcagacgcatcatctcaggaatgctcagtaccggatgggtatcattgagatgaatcgcgattttatccgccaggttatcgtaggttttatgcaactgataatggcggcttaaaatgtcctgaatggtgctggaaaccaggaagtattcctgacgcaggcgcagctcacgcccggagtaggtggagtcatccggatacagtacgcgagatacgttctcggagtggtttttatcttccactgccgcgaagtagtcaccctggttgaatttaccgaggttaatttcgctactggcttgcgcactccacaaacgcagcgtgttggtcgcgtcggtgtcgtaaccagggattatctgatcgtaagcgactcccagaatctcttcggtttcaatccagcgcgtttttttaccttcctgctgaatgcgaccgccaaaacggactttatagcgcgtgttgtggcgtttgaattcccacgggttaccgtattccagccagtagtctgggctctctttctggctaccgttaacgatgttctgcttgaacataccgtagtcatagcggatgccgtaaccgcgccccggcaaccctaacgtcgccagagaatcaaggaagcaagccgccagacgtcccaggccaccgttaccgaggcctgggtcattttcttcatcaatcagctcttcgagatttaaccccatcgcttccagtgcgccctgtacatcttcgtaaattcctaggctcaacatggcgttggagagcgtacggccaatcaaaaactccatgctcaggtagtaaacctgacgagtttcttggctcaactgggcacggttactacgtaaccagcgctccacgagacgatcgcgcacagcaaataacgttgcgttcagccattcatgtttattggcgacgaccgggtcctttccaatcgtaaacatcagcttgtaagcgatagagtgcttaagagcttctacgctaagcgtggggctactatatgtaaacggagcattcatataggcgtttcctgaaaattatttcaagcgatagtaaagctcacggtagctcttcgccgcgacctgccagctaaaatccattgccatagcctgacgttgcacaaaccgccacagactaggacgggaccacagtacaaaagcacgtcgaatagcccgtaacaggctccaggcattactatcttcaaagacaaacccactggcgacgccatctgcaaggttctcaagagaacagtcagaaaccgtatcagcaagcccaccggtgcgccgcactaacggcagcgtaccgtacttcaatccataaagttgcgttaagccgcacggttcaaaacggctgggcaccagaatgacgtccgcgccgcccataatgcgatggctaaatgcttcgtgatagccaatctgaacgcccacctgaccggggtattccgctgccgccgcaaggaaaccttcctgcagcaccggatcgcccgcgccgagtagcgccagctgcccgccctgctccagaagacccggtaaggcttccagcaccaggtcgagacctttctggctggtcagacggctcaccactgcaaaaagcggcactttatcgtcaaccttaagccccattgcgatttgtaactggcgcttattttccgctttatcttccaacgtatcgcgggtgtaacggctggccaacagtaagtccgtctctggactccagattttctcgtccacgccgttcagtacgccggaaagacgcccttcacggtgacgctgttgcaacagaccttccataccgtaggcaaactgcggttcggtgatctcgcgagcgtaggttggactgaccgccgtaatgtgatcggcatagtacagaccggccttcaggaaagagatttgtccgttgaattccagcccatgaatattaaagaaactccatggcaattggatgtcattcatgtgatgtgcataaaacatgccttgataggccaggttgtgcacagtaaacacgctcttcgccggacgcccgcgcgccgccagatacgcaggcgcaaggcctgcatgccagtcgtgcgcatgcaccacatcaggacgccagaatgggtcaagcccgctggccatttctgccccaacccaccccagcagcgcaaaacgcaatacgttgtcggtataggcaaataagttggtatcgtgatacgggcttcccggacgatcatagagatgcggcgcgtcaatcaggtaaatgccaaccccgttgtaatgaccgaacaacagcgtgatatgtccggcgaaggtatcacgacgggatactacctgcgcatcggtcacgccacggcgaatatcgggaaatgcaggcaacagtacgcgagcgtcaacgccgtctgcgatttgtgctgcgggtaatgccccaataacatcagccagaccgccggttttaagcagcgggaacatctcactacatacatgtaaaacctgcattatcgctcctgtttatgccctaacttccgtagcatttcgcgcgttaccagcacgatgccttcttcactacgatagaaacgacgtgcatcttcctctgcgttttcaccaatcaccatgccttccggaataacacaagcacgatcgatgacgcagcggcgcagacggcagctgcgacctacccatacttccggtaacaatacggcggaatcaatgttgcagaaactattcacgcgaacgcggctgaacagaacggactgcaccaccacgctaccggagatcacacaaccgccggaaaccagactgttaagggtcatcccgtggctaccggagcgatcctgcacgaatttcgctggcggtaaactttcattgtaggtgcgaattggccaattgcgatcgtacatatccagttccggcaccacagaggccagatcgaggttcgctttccagtaagcttccagcgtacccacatcgcgccagtacggctcggcatccgggtcggattgtacgcaagagagcgggaacgggtgcgcataggccagaccggcttcggtgatcttgggaatcaaatctttgccaaagtcgtggctggagttctcatcgcgatcgtcttcttccagcagttcatacagatagtcggcgtcaaagacgtagatacccatactcgccagagatttgctcggatcgttcggcatactcggcgggttagcaggtttttcaacgaattcgataattttatcgttctcatcaaccgccataacgccaaatgcggaggcttcttcaatcggtactggcatacaagcaacggtgcaacgtgcgcctttttcgacgtgatcgataagcatacggctgtagtcttgcttgtagatatggtcgcccgccaggatcaccacgtattccgctttataacggcggataatgtcgaggttttgggtgaccgcatctgcggtgccgcgataccagttttcccctttcattctctgctgtgctggcagcagatcgacaaactcgttcatttcttcattgaagaaactccagccgcgctgaatgtgctgcaccagagtgtgggactggtactgggtgatcacgcccatacgacggatcccggagttgatgcagttagacagcgcaaagtcgataatgcggaacttaccgccgaagtgtacggccggttttgctcgcttattggttaaatccttcaggcgggtaccacgtcctcccgccagtatcagggcaacagatttcaatggcagctggcgcgccaacattaagtgatcgttcttctctaaactaaccatgactaactccttttttatcatctctggaacacacacaatccgtgtgcaggtccctgccagacagccgtaatcactgggttatcctctccagcgaatgggggaatggcgtgccactccccagcaggtaaaacaatctctgttacctcaagcgtggcgttaattgcgatcaaaaagcgatcgctgagcagaatttgcagctgtttcggcccgttttgccactcatccgtgcttaaaggttgagcatatcgatttagccaacggacattgccgtcgccttcttcccaccagcgattctccaccaaagcgggaatgcgcttgcgcagatggattaacgcggcggtaaatgcggttaaaccactgcttgcctggctccagtccaaccaggttaattggttatcctgacagtaggcattgttattgccatgctggctgtgaccatgttcgtcaccggccagtaacatcggcgtaccctgggagagcaacaacgttgttaacagggcgtgaatgctgtcgcgccgccgttcaaccaggtcaagagaaccgcctaacccttctttaccatgattgttactgtaattgttgttggtcccgtcgcgattttcttctccgtttgcttcattgtgtttatggttgaagcaaacgcagtcgcgaagcgtaaaaccgtcatgcgcggtgacgagattaatcgcggcactcggcagacgaccattacgtttaaaaacatcgctggaggcagcaaaacgcccggcaaacgcccccagaggcaaatcataatgtagccagaaacgacgggcagcatcgcggaaatgatcgttccactcggcaaacagcggcgggaaatttcccacctgataaccaccaggagcgatatcccacggttcagcaattaacttcacctggctgagcaccgggcagttctggatagcggtaaacaacggcgcatcctgacggaactctggcgtacggcccatgactgccgccagatcaaagcggaaaccatcgacgtggcaggtttctacccaataacgcaggcaggcgctggcataatccaccaccgccggatgactcaaattgagcgtgttgccgcaaccggtccagttgtgataatcgccgtcttctcttatccaataatagctacggttatcgatcccacgcaggctgaataacgggccgtcgaggtccagttccgcactatggttgagcacgatatcaagaatgacttcgatacccgctttatgcagtgctttgattgcatcgcgaaactcatccagcgccgtttctgggctgcaggcatacgccggatgcagcgcaaacatcgccaccgggttgtaaccccagtagttacttagccccatgcgttgcagacgtggttcactggcaaactgcgccactggcagcagttccagcgcggtaatgcccaattgtttcaaatagttgatcatcaccggatgcccgagggctttataagtgccacggatctcgaccgggatctccgggtgcaagtacgttaatcctttgacatgggcttcataaatgatggtgctgccccacggcgtgcgcggcggggcatcatcttcccagtcatagtgatcaaccaccactacgcatttcggcgcaatggcggcgttgtcgcgatagtcaggttcattatgaccggcgtgcagcagcgggttatctttaaactccccgtcaatttgccgcgcgcaaggatcaatcaacaacttcgccgggttaaagcgatgcccctcggcgggttgccaggggccatgaacgcgataaccataacgcaaacccgggcgcgcatccggcagataaccgtgccaaatgtcgccactgtgccctggcaagtcatagcgatgttcctggccattggcgtcaaagacacacagttctacccgctcggcatgagcggagaaaagtgtgaagttgacgccctgaccgtcgtaatgcgcgccgaggggagcgggtttgccaatggcgagttgtgtcattctgcctcccgaaccagccagatagtggccagcggtggtagcgtcaggcttagactatgctgacgaccgtggctggcaatctcatcgctgtgtaccgtgccgccattgcctgcattactgccgtgatagtgcatggaatcggtattgaggatttcacgccatttgcccggctggtttatgccgaagcgataatcatgacgcggtaccggcgtaaagttactggcaacgatgatttcgttaccctctttatcgcgacgcacaaagatcagcacgctgcgttctttgtcatccaccaccagccattcaaagccgtacgggtcaaaatccagttcatgcattgctttatggtggcggtaggtgaggttcagatcgcgcaccagacgctggacaccgtggtgccagttatcgccgccttccaacagatgccagtcgaggctggcgtcatggttccactcgcggccctgggcaaattcgttacccatgaacagtagtttcttgcccgggaatgcccacatccagccatagtaggcgcgcaggttcgcgaatttctgccatgcgtcgcccggcatgcggtcgagaatgctttttttaccgtggaccacttcatcatggctcaacggcaggacgaagttttcagtgtagttgtagagaatcccgaaggtcagtttatcgtgatgatactgacgataaaccgggtcgagcttcatgtagtccagggtgtcatgcatccagccgaggttccacttgtaccagaagcccagaccgcccatatcctgcggacgagaaacgccagggaaatcggtagactcctcagccattgtcaccgcaccggaaacctgctcaccaagaatacggttggtattacgcaagaattcaatcgcttcaagattctcgcgcccgccaaattcgttcgggatccactccccctctttacggctgtagtcgcgataaatcatactcgccaccgcatcgacgcgcagcgcatcaataccaaaacgttcaatccagtaaagcgcgttaccgacgaggaagttactgacttcacggcgaccatagttgtagatcagcgtgttccagtcctgatgatagccttcacgcggatcgctgtgttcatacaagttcgtgccatcaaattcggcaagcgcaaagtcatcagtcgggaagtggcctggcacccagtcgagaatcacgttcagaccagctgcgtgtgcggcatcaatgaaataacggaagtcgtcgcgagtaccaaaacggcgggttggcgcatacaggccggttggctgataaccccaactgccatcgaagggatgctcgttaatgggcagtagttcgaggtgggtaaagcccatccatttagcataaggcaccagttgatcggccagctcgcggtagctcaaccagaaattgttgtcggtgtggcgacgccaggaacccaggtgaacttcataaatagagattggcgcatcaaactgattcgcttttttgcgctcttcagtctgtacaaccttttccggcagcccgcaaataagagacgcggtttccgggcgcatttgcgcttcaaaggcataagggtcggacttcagacgcaagttgccattggcatcaatcatctcgtatttatagagctgaccgttatgcgccccagggataaacagttcccagatgccgctctctttacgcaggcgcatcgggtgacggcgaccgtcccagtagttgaattgcccaaccacgctgacccgacgggcgtttggagcccagacagagaaacgcgtacctgtgacgccatccatagtatctgcatgcgcgcctaaggtttcatacgggcgcaggtgagtaccttcagataatagccaggcatccatttcctggattagcggaccaaaacggtaaggatcatcaatcaggttttgctgaccatgccagacaacagccaactgatagcggaaaaaattcttacgtcgcggaatgacgccgctaaagaatccccgactgtcgagacactccagttttgcgagtttgcgcccggttttcggttcaatcacccacacatcggtagcgtcgggtaaaagggcacggacttccagtcccgcggtggttttatgcattcccagtacggaaaaaggatccgcaaaatggcctgcaattagcgcgttaatcacgtctctatcgatacgatcggacatgcttgtcttcctgttttattgtgtcaccccatccaattggatttttgacttctggttgtgacatttttttgacctgaacggcgcagcactctgtgcatcctctctgcgtcgtcctcacttcaggtaaggctgtgaatactcatgtattcagccacccttaaagaatagccaatgctctatttaactcccggtaaatcatgaaacatctgcgcttactcctgtattacgcactaacaggggcggcatcgcgccccagatttaatgaataaagattacgccagttgacgaagcatccgacgcagcggctccgcggccccccacagcagctggtcgcccacggtaaaggcactcaggaactctggtcccatattcagcttacgcaggcggcctaccggcgtggtcagcgtgccggtaacggcagctggggttagctcacgcatagtgatttcccgatcgttcggaacgactttcgcccacggattgtgcgcagccagcagttcttccacggtcggaatagacacatcttttttcaatttaatagtgaatgcctggctgtggcagcgcaatgccccgacacgcacacataaaccatctaccggaattacggaagatgtgttgaggatcttgttggtttccgcctgccctttccactcttcgcggctctgaccgttatcgagctgtttgtcgatccacggaatcaggctacccgccagcggcacgccaaagttatccaccggcagctcaccgctacgggttaaggttgtgactttgcgttcgatatcgagaatagcagaggacggggtcgcgagttcatctgccacatggccatacagatggcccatctgggttaataactcacgcatatgtcgcgcaccaccgccggaagcggcctggtaggttgcaacggacacccaatcaacaagatcattggcgaataaaccacccaagctcatcaacatcaggcttacggtacagttaccgccaacaaaagtcctgatgccattatttaatccgtcggtaatgacgtcctgattgacggggtcaagaatgatgatggcgtcatctttcatgcgcagagagcttgctgcgtcaatccagtaaccttgccatccgctttcacgaagctttggatagatttcgttggtataatcgccgccctgacaggtcacaatgatatcgagggcctttagcgcctccagatcaaaggcatcctgaagtgtgccagtggttccgccaaaagacggcgcagcctggccaagctgagaagtagaaaagaagacagggcgaatggcgtcgaagtcgcgctcttcaaccatgcgttgcatgagaacggagccgaccataccgcgccagccgataaaaccaacatttttcataagcgtttttttcctgcaaagatgtgtgctgtataaatgtgccggtctcctcttggcacatctttcaccatacaaaaagcagccaaagtcgcaagtgaaattaatcaatgatagcgaagccatcagtaatgcgacttatcctgctttgttagcacgcagaaagtccgcggcaattatcagggaatttgagttatgaatgaaatcatttctgcagcagttttattgatcctgattatggatccgctcggaaacctacctattttcatgtccgtactgaaacatactgaaccgaaaagacggcgggcaatcatggtgcgagagttgcttattgctctcctggtgatgctggtgttcctgtttgcgggtgagaaaattctggcatttcttagcctacgagcagaaaccgtctccatttctggcggcatcattctgtttctgatcgccattaaaatgattttccccagcgctagtggaaatagcagcgggcttccggcaggtgaagagccatttatcgtgccgttggcaattccgttagtcgccgggccgactattctcgccacgctgatgttgttgtctcatcagtacccgaatcagatggggcatctggtgattgctctgctgctggcctggggcggcacctttgtcatcctgctacagtctagcctatttttacgtctgctgggcgagaaaggggtgaacgcacttgaacgcctgatgggattgattctggtgatgatggcaacccagatgttcctcgacggcattcgaatgtggatgaaggggtaacgaggagagtttttcgaaaagaacccggtagcgtcacaactaccgggcgaacaaacttaactcaacagctggaacgcaatcatcccaacgatggcaccgacagtgccgaggatggtttccatcatggtccaggttttcagcgtttcggcttcggtcgcgccggtaaatttaccgaacaaccagaaaccggcgtcgttaacgtggctgacaacaatgctaccaccagcgatacaaatgctcagcgccgccatttgcgcaccggagtagttcagttgttcaataaccggcatcaccagtcctaccgccgttaaacaggctacggtggcagaaccctgaatgatgcgcactgcagctgccagcacgaagcaggtgatagcaatcggcaggcccatgccggttaacgcttcgcccagtgccggacctacgccagagtcaaccagcacctgtttgaacacgccgcccgcaccaatcaccagcagaatgatccccgccggttgcagcgcgtgaccgcaaatctccatcactttgtcttttggcatgccctgacgcattgccagaccgtaaatcgccaccagacaagcaaccagaatcgcggtaaacggatgaccgataaactcaaaccattcgtaagcagtacttccttccggcacaaaacgcgcggcaatggttttcagccctaccagcaccagcggcagcaggatcaggctcaggctgaatccgaaagatggcattttgccttcgccgagatgcggttcgctgatgtcgtcaggaatatgcagctcaacgtaacggctgatgaagttaccccacagcggcccggcaataatcattcccggaattgccgcacacaggccaatcaggatcatccagccaaagtcggcattcatctggcttgccagcagcatcggcgctggtccaggcaccagaaatgccgccgctgccgccacgcctgcaaataatgggattaccagcttcaccaggttcgtaccggtgtggcgcgccatactgaaagcaacgctaatcagcagaactatcgccacttcaaagaacagcggtagcgcacagaccagccccgcaaggccgatggcataatgcgcgcggctgtgaccgaaggatttgagcattttgacggcaatctgatcgactgcgccggtttcatgtaagatcttgccaaacatagctcccagggcgacaaccaccgccaggaagccgagggtgcctcccatccctttttccatcgtcgctgcgattttatcgagcggcataccagaaaaaaggccagcccccatggacaccaccattaaagccaggaaagcgtgcatacgcgccttcatgactaaaaacagcagcagtaaaacagaccctactgctgttaaaacaagcgttaatgtagtcactacttatttgccttttttaataacctcaatggtgcttgccacaacaccttccagcggttgatcgatatccaccaccagtacatcggtttcgtccgcacccggctcctgcagcgtttcaaactgcgtcaccaacatttgggttttaaagaaatggcctttgcgcgctttcaggcggatttcaatcacatcaaaatcgcctttcaaatagatgaaagagagattcggattaccttcacgcagcaagtcgcgatagtgttttttcaatgcagaacagacgatcaggctcactttattagtgcgctgcatagcaaacgcggcgtcgttcagcgcctgcaaccacggtttgcgatcgtcgtcattcagtggttcgccagacgccattttttcgatattgcgccgtggatggaggaaatcgccatcaagaaacgcggcatgaagttgatgcgccacttcactggcgaccgcagatttgccgctgccgcttacgcccatcaagacgtaaatgtggtgatcatggttagtcgtgctcaaagtggtgcccccacaatacaagaattaaaaatgttacgggtaactgttatcggtaacattgtccagccggacaatatcagaagcaatatccatccatgccttaagtgtataagtgtgagctacttcaaatttgtgggcttaaatagatccgcccggactcaaggtgaaacctaaatctaacattttcggtgtcacagattcgccacgaatacgcgccagcaggcgttcagcgccaatactgcccatccgctcacgcggcgtcagcacgctcgcaagtcgtggctccatcacctgaccaatgtcatgaccgtggaaaccggcaatcgccatatcgtcaggaacttttaaccccagacgctgacattcaaacgccgcgccgaccgccaggtcatcattcgtacagaacacgccatccagctgcggatattcccgccgcgcctggcgaatcagttcaataccggaagagtaagaagaagattgctcaaccatcacgctatatggcaccaggcctgcatccagcatcgcctgttcgtatcccttctgtttgatgatagtacgttcgtcgagacgtgcgccgagataggcaatgtggcgatgcccgcgagcaataatggcagtggtcatctggcgtgctgcttcaaagttatcaaaaccgacggcgatatcaaggcatgggctcttgctgtccatcagttccaccacgggaatacccgccacttcaatcatctttaaggtgcgcggcgtgtgggtacgttcggtgaggatcaggccgtcgatattccaggagagcatggattcgaggcgttcttgctccatttccggtttataaccgtagtgcgccagcatggtctgataaccgtgcgcgtcggtgacgctttcgattccgcgtaatacttccgcgaaaacctggttggtgagagaaggtaacaggacgccaatcgcccggctggtggcgttagagaggatatcgggcgcacgattgggaatatagcccagttcatcaagagccgcggcaatcttgccgcgtagagcgacggaaacctgctccgggttgcgtaaaaaacggctgaccgtcattttggtcacgcctacacggtcagccacatcctgaagtacgggtcttttctttttcatcgtcctgaaggtacaaaagagatagattctcttagtttaacacggacacatcagaaccttcccggggaaaacagtgcttgtttacaattattagatatacactaaatcaattgcatcgcattgtgctaacgacgcggcaaaaccccggaagcgtacatcagcacgcgaccggagcgagcgaggaagcctgcaaaaaggcaggcttcaaagatgccgttgagttttaaaccggcggcagatcgaacagtaacacttcgctgtcgctatccgcatggatggagattgcctgctcatcccagattgccagaccatcgctggtgctggctttcacgccgttaatggtgacattgcctttcaccacctggatccagacgcggcgttcagcggcaatctgatgcacgctctgctcatctttcagcaacgcccagcggtacagttccatatcctgatgcactttcaaactaccatctcgcgcatccgggctgagcaccagctgtttgccctgtacggcatcgaagcgacgctgttcataacgcggcgtaataccgttttcttcaggcatgatccagatctgatacagatgcagacgctcggtgctgcttgggttgtactcactgtgacgaatacccgtaccagcactcataatctggaactcacccgccggaacctgctctttattgcccatgctgtcctgatgctcaacagtaccttccagcacgtaggtcaaaatttccatatctttatgcgggtgagtgccgaagccctgccctgcttcaatcacgtcgtcgttaatcacgcgcagcgcggagaagcccataaagttcggatcgtaatagttggcaaaagagaaagtatgccaggagtccagccagccatgatttgcatgaccacgttcatttgctttgcgtaagtagatcatttgtattcgccccctgaatgatttcgatgggcttagtgtggacccgatctgcctgggatgatagagggtgaaaattgacccctctgttcaaaaaaattgaactattcgaggggccatcaaacttacttagcgagagttactgtggagggagaggcttgctcaaatccgcgttcaaggatttccagattggtaagaacttcagattccttgacgtaatttggcgcaccgtgggtgatggtttgatacaacgcatcataaacgcgcccgtaatcgcccatctccggcttcatctcttctctgaccgtcacgccctcgtcattgacatactccagcacaccgacgctatcatccgctgcgaatcccggttcgcccggcataatattagccttcaggctggtttcctgctggtcgataccgtatttaataaagctacctttcttaccgtgaacgataaatttcggataatcgattttcaccagatggctggttttgacgatggctttcaggtcgccataaaacagttgcgcttcaaaggtgtcgtcaggattggctttattacgcaggctgcggatgtcataagcgacgtgatccgggcgaccgaacagagaaataatctggtccatcgtatgcacaccaaggccataaaacgcgccatcctgcggcagcccaggtttggtttctgccaccgggcggtaatagtcaaaatggctttccacttcaacaatctctcccaacttgccactttcaatcgcttttttcgctgtcaggaagcaggagtcaaagcgacgattctgatacggcgtgacggtcagccctttgcttttcgccaacgcaaacagctctttcgcctgcgcaagtgtcggagtgaacggtttttcgaccagcacatttttcccggcttccagcgcgcgtttcgcgtactcgaaatggctgtccgcgtgggtgcagacaacaaccagcttaacatcgggatcgtttagtacttcgtcgagatcgctggtgaaatggatatgggaataaatgggagcctgttcttccggcttcgcatggcgacgaaaaatatgcgcgacatgccagctatccttgcggttaagtacatacggcagatggtaacgggtggtgcttttgccgaagccaataaaggcgcagttgatgaccatgatttcgtcctttttaaggtggttatttacaccttagcgcaaagcggacgtggttcctactggagtgcgcataacgaacacaagcactcccgtggataaattgagaacgaaagatcaaaaaaaaagccagcacccggctggctaagtaatactggaagcaatgtgagcaatgtcgtgctttcaggttctccgcgagggtcttcctgatcgcgagacaataataatcattctcattcgcacttgtccaacactttttgcaaaaaaatgcatttgactcgcatttgaaagtcaatgatgttgaaagggacatttaccccaaagaggacaaaggaacaaatgctcttcccacgaagagggccgctaaccttagtaccccgccgttaaatcatccacgctgcgcgggtcggatgcgccgtacaactcaccgtccggcccaaccataatgctttgtgtactgcccatcgcctctttcagcgccactttctgaccttttgcttccagcagcttgagcgtatccgggctaaaccctttttcgacacgcagctcgtccggcaaccactgatggtggaaacgcggcgcattggtcgcttcggcgacgttcaagccataatcgatgctattcaccaccatttgcagcactgtagtgatgatccggctaccgcctgggctaccggtaaccagccaggttttaccgtctttcaccacaatggtcgggctcatgctgctcagcgggcgtttgttcggcccgacggcgttggcatcaccgcccaccagcccgtaaacgttcggtacgcccggtttggcggagaaatcatccatctggttattaagcagaataccgctctcgcccgcgacaatgcccgtaccgaaggtggtgttcagcgtataggtcaccgccaccgcgttaccatctttatccaccacactgtaatgggtagtttgattactctcataaggcgcaagcttgccggggcgaatttcgctggatggcttcgctttattgatatcaatttgatcggcaatagatttggcataggctttattggtcagcgcctgccacggtactttgacaaaatccgggtcgccaagatattcgctgcggtcggcgtaggcgtatttctccgcttctgccatgatttgcatcgcatcggcgctgccaaagccgtatttcttcatatcgaagttttccagaatattgaggatttgtacgatatggatcccgccggaggatggcggtggcatggagtaaacctgatacccgcgataatcgccgcttatcggagtgcgttcgaccgctttataggctgctaaatcttctttagtgatcaagccaccgtttttctgcatctcctgggcgatctgttccgcaatcgtgcctttatagaattcgtccgggccgttttcagcaatcatctccaggctctttgccaggttcgcctgcaccagcgtgtcgccctttttcagcggctcgccctctttccagaagatagctttactgttttcgtgattcggcaacacttcgctaccgtaggttttgagatcgtcagccagcgcgtcgttaacgataaaaccatcgcgtgccagtttaaacgcgggctgcacgactttgttcagcggcatggtgccgtatttatccagcgccaggctgaaacctgctaccgtacccggtgtgccggaagccagatggctagtgagactttttttgctgtccgggttgccctgatcatcgaggaacatatcgcgggtcgctttggcgggtgccatttcgcggaaatcgatagccgtggtattgccatttttgctgcggattaacataaaaccaccaccgcccagattccctgcctgcggatgcgttaccgccagcgcgtagcccaccgccacggcggcatcaacggcattcccgccctccttgagaatatccacccccacctgagtggcagtggcgtccacagacgctaccattccctgtttcgcgcgtaccgggtggaagacatcttcctccacaccatagctgacgggcggcgcaggaggcgcggcggcggcgctaaaacaacttccactgagcagagcagcaatggccacccggcgtaaaaacgtcggttttatcatcgttattctccagagattaaggggcaaccccagctaagcctggtatataactctgaattaatcatcgttttgtcgggaagcgagtaaacttaaaggatatcttcagaggaggatacgcgatgaaacgacttctgattcttacggcactcctgccgtttgtcggctttgcacagcccattaatactctgaacaaccctaaccagccggggtatcagatacccagccagcagcggatgcaaacccagatgcagactcagcaaatccagcaaaaagggatgctgaatcagcaactgaaaacgcaaactcagttgcaacagcagcatttagaaaaccagataaacaataattctcagcgggtgttgcagagtcagccgggggagcgaaatcccgcccggcagcaaatgctgcccaacaccaacggcgggatgttaaacagcaaccgtaatccggatagtagcttgaatcagcagcatatgctgccggagaggagaaacggcgacatgctgaatcagcccagcacgccgcagcctgacattccgttgaaaactattgggccgtaattattgggccgtaaagttcggaccaatcacgtcaatcgcatcggtacagatgcaatccacaccccagcgcagcaactctgctgcgcgctggggtttattgacggtataaaccagaatccgcagtccggcgtctttcaactgcatcactcgcgctttattgagtaacttatgattgagatgaatagagacgcagcccagccgcgcggtcagttcgcgccagtcgtcgcgccactcatccagcaacaaaccgcgcggcagttccggtgccgcctgttgtgcagcttctaaagcatcaatctcaaagctactcagcagcggcggcgtcataccggcccacagctcgcgtgccgccagcgccaccattttgcccgttaatggcccggtgccggtggtgggtttgatttcgatattcgccatcatcccgtgttcgcggcaacgttccgccacctggctaagcaacggtagcggctcacctttaaacattttgctgtaccaactgcccgcatccacgcgcagtaaatcctgccagttcagttcacccgcgacgccccagccgttgctggtacgttcgagattgtcgtcatggagcaggaagatctcgccatctttgcttaacttcgcgtcaaattcgatcatcttatgaccgtattttgccccgacgtcgatactcgccagggtgttttccggggccagcttaccgccgccacgatgagcgacgatgcggggataaggccagttactcatactcgttgtcctgtttcaccatcaaaaagatgcagctgattttccgccagatgcagccacagcgtgctgcctgccgtcgggcgctcctgatgcgccagtcgcaccaccagcttctgctcgccccagcgtccgtgcgccaggttatctgcgccgaggatctccagcgtgtccatcaccatcggtacgccgccttctgcctggctgcttagcgcaatatgttccgggcgaatgccgagagtcattttacgcccggcatactgacggtagccaccgtttagcggcagctcaataccgccgtccagttcgaaatgcgtgccttcgttattcacgcggcctgtcagcaggttcatcgccggactgccgataaaactcgctacaaacaggctggcgggcttttcgtagacttcaactggtgtgccaatctgttcggcaacaccgccgttcatcaccattactcgctgggcgagcgtcatcgcttcaacctgatcgtgagtaacgtagagactagtcgttttcaggcgacggtgcaactgttgcagttcaagacgcatctgcacgcgcagcttggcatcgaggttagagagcggctcatcaaacaggaacaccgccggatcgcgcacaatcgcgcggcccatcgccacacgctggcgctgaccgccggaaagctcgcgcgggcgacgtttgagcagaccgtccagctccagaatgcgcgccgcttctttaacgcgctcggcaatttgctgcttgcccatgccgcgaattttcagcccccacgccatgttttcttcgacactcatatgcggataaagcgcgtagttctggaacaccatcgcaatcccgcgatcttttggctccatttcagtcacgcgctggtcgttgatccagatatcgccttctgtcacccgctccagcccggcaaccatgcgcagcagcgtgcttttcccgcagccagacggcccgaccatcacgataaattcgccatccgccacatcaagggtcagcggtttaatgacctgggttttaccatcccagcttttggttactgcctgtaatttcagtcctgccatcttatttctcactatcgaccaggccgcgcacgaaggcacgctgcatcactaaaacaatcaccaccggagggataagcgttaacaacatcgccaccatcacactgttccattccgtggtgccttcgcctgtagcgatcatccctttgatccctgccacggtggtgccgagatccacatcggtaataatcaacaacggccacaaatactgattccagccgtagataaaggtgatcacaaacagcgccgccagattagttttggagagcggaaaaacgatgtcgcaaaagaagcgcattgggcttgcgccgtcgatccgcgcggcttccaccagctcatccggcagcgtcataaagaactggcggaacaggaaagtagcggtcgcgctggccatcagcggcagcgttaaaccggcgtagctgtcgagcatctgcaggttggcgatgacttccaccgtcgggaagatacgtacttcaaccggcagcatcagggtgataaaaatcatccagaagaagaggttacgtagcggaaaacgaaaccagacaatggcaaatgcgctgagcatgctgacggtaattttgccgagcgtaatgctgaacgccatcacaaagctgttaagcaacatccgccagaacggcgcgctattcgtgcctaccccgttcacccagatgttgtggatgttttccagcagatgtgtgccggggatgagcgtcatcggcgcggcatagacggcctgtttatccagcgtcgccgcgacaaacgccacgtacagcgggaagaggatcaccgcgatcccgaggatcagcatggtatggctgaatatcgtcagccacggacggttctcaatcattggtaacgcaccttgctttcaacatagcggaactgcaccaccgtcagcacgatgacgaggaacatcaacaccacgctctgtgcggcagagctagccagatccagtccggtaaaaccttcgcggtagatcttataaatcagcgtcgtggtggcctgaaccggcccgccggacgtggcggcgtcgatcaccgggaaggtgtcgaagaaggcatacaccaggttcactaccagcaggaagaaactcaccggggcgataagcggcagcgcaatcttaaagaagcggcgaatcggccctgcaccgtcgatggctgcggcttcgatcaagctacggggaatggattgcagcgcggcatagaagaacaggaagttgtagctgatttgcttccatacactggcaaacaccaccagaaacattgcctgaccgctgttttgcgcgtggttccagtcgtagccgaactccgcgagaaaatgggtgatcagcccgcgaccggggttaaacaggaagatccacaatacggcggcaacggcgggagccacggcgtaaggcagcaacattaaggtttgatagaaacggctgccgcgcacgatgtactccaccagcgccgcaaagaacaggcttaccagcaaaccgctgacggtgacaaaggtgctgaattttatcgtcgtccagaaggagtcgagatagtagctgtcatggaacagcgtgacgaagttatccaggccgacaaactggctggagaaaccaaacggatcgacgctttgtaggctgtaccacaacgcttcgcccgcaggccagataaaaaagataacggtgatgatgagctgcggcgcgaccagcagataaggcagccagcggctgcggaacaccggacgggaactactcattacggttgattcctgaactgtgccggatgcgcttcgcttatccggcctacacgcgatgccaggtcagataagcgaaacgcatccgacattacactgattaagacttcgtgcttttctcaaagcggcgcagcaactgatttccacgctcaacggcggtatccagtgcctgctgtggtgtcttcttaccggtccacacgctctccagctcttcatccacaatcacgcggatctgcggcatgttgcccagacgcagccctttggtgaacggcaacggcggcttattcagcatctgacgcgtcgcggtatccgcccctgggtttttctcataaaagccctgctcacgggtcaggtcatacgctgctttggtgattggcagataaccggttttctgatgccactcggcagcgttttctggcttcgcgaggaaatcgaggaacttcgccacaccggtatacgtttctttatctttaccctgcatcacccacaggctggctccgccgataatggcgttttgtggcgcatctttcgcatcggcgtcgtaaggcatcatgcctacgccgtagttaaatttggcgtactcgcgaatgttggcaagagaaccggaagaggcggtggtcatcgcgcaatcaccgttatagaacttctcggtggattcatccttacgaccgacgtagctgaagtcgcccttcttgttcatctcctcgagcatggcgatgtgtttcacctgctccggcttattgaactccagcaccgcgtccgtgccgtcaaagccgttgtttttgctggcaaacggcagaccgttccaggcgctaaagttttccagttggatccagccctgccagccgctggcgtagccgcacttcatgccggaggctttcagtttcgcggcatagtccgccagatcctgccaggttttcggcggctgttccgggtctaatcctgctttcttgaaggcgtctttgttgtaatagagaacgggggtgctgctgttgaatggctgggagagtaagtggcccgttttgctgtcggagtagtaaccactaaccgtcggcacaaactggctctcatcgaactgaatccctgcctctttaaacacgtcatacaccggtttaatggctttgctcgccatcatggtggcggtgccaacttcataaacctgcaaaatagccggcgcgttgccggtacgaaatgcggcaatccccgcgcttaaattctgttcgtagttgcctttataggtcggtacaattttgtaatccgggttttcggcgttaaaacgttgggccagagaatccacctctttacccagttccccttccatagaatgccagaacggaatggtcgtcactgcctgtgcattccccattaacgccagtccgagcgccagtgcactagctgtataatgtaacggtttcatcgtttatctctcttgttgtaccgaatgcgcgaattcacgcgttttatgctcgcggggtaacatgacatgctcgaattacagaaaaataacttttttgttacatttgtaagatagtaaggtgtcagaaagatgacaaggcggtgacggcgtgggtgagggaaaatgggagatggggcacggataagcgggaaaatatagaaggtctgaatcaaactctacagattgctcatcgtttcatgccggatgcggcgtaaacgccttatcaggcctacaagatcgtgcaaattcaacatattgccactcacccagtaggcctgataagcgcagcgcatcaggcaattttacatttgtcacctgtctcaaaggagtcttttgactccctatcaatcaacgtgttattacccgcctaaatacgcacttctcaccgcttcattcgccagcagcgcatcaccagtatcggaaagcactacatggccgttttccagcacgtagccgcgatccgccagctttagcgcctggttggcgttctgctcgacgagaaagatagtcatcccctgctcgcgcagctgctcgatggtgtcgaaaatttgctggatgataatcggcgcaagaccgaggcttggctcatcaagcagtagcaaacgcgggttgctcatcagcgcacgaccaatcgccagcatctgctgttcaccgccggacatggtgcccgcccgctgaatacggcgctcatgcagacgtggaaacagctcatacacccactttatgcgctcctggaactggtcgcgttcagcaaaaaaaccgcccatcgccaggttctcttccaccgtcatccggctgaagacgcgacgcccttccgggacaatcgccaccgcttcgcgcatgattttcgctgtctgccagtcggtaatgtctttatcatcaaacacaattcgcccgctggtggcacgcggatcgccgcataacgtgccgagcaaggtggttttccccgccccgttcgcgccaatcagcgtgacaatctcgccctgattgatatgcaggctcacctcatgcagcgcctggattttgccgtagtgggcgctgactttgtcaaaggacaacatgactttttccatcttatgcctcacctaaataggcacggatcacgtccgggttattacggatctgctccggcgtaccgtttgccagcggcgtcccctgattgaccacgtaaattcggtcgctaattcccatcaccagcttcatatcgtgttcaatcaacaagatagtggtgttgtgatgattgcgcagttcggcaatcagctcatccagctctttcgtctctttcgggttaagacctgccgcaggttcgtcgagcattaaaatctccggctgcgtcaccatgcagcgggcaatctcaagacggcgctggtcaccataggccaggttactcgcctgacggttggcgtgttccagcaaaccaatgcgctcaagccaggtcgcggcgcggtcgagcgcttcgctctgggcgcgacggaaggatggcgttttcaacaggccagagaacagcccggttttcagttgctgatgctgcgccaccagcaggttttcaattaccgtcatttcacggaacagacgcacatgctggaaggtgcgcaccacgcccatgcgggcaatttgctgccccggtaaaccttccaggtgctgatcgcgcagtaaaatggtgccgccggtgggtttgtagaatccggtcagacagttaaaaaccgtggtttttccggcaccgttagggccgattaagctgacgatctcctgcgggtacagttcaagattgacgttgttcaccgccagcaggccgccgaagcgcatcatcaggccgttaacagataataatggctgactcatgcctgctctcctttcgctgcgccgtttttcagcttcagttgcgggcgcgtcatgggcagcaagccctgcggacgccagatcatcatcagcaccatcaaaccaccgagcattaacatgctgtattcgttgaaatcacgcatcaactcgcggctcaccaccagcaaaattgccgccagaatcaccgcaaattggctgcccataccgccgagcaccactatcgccagcacaaacgcgctttcggcaaaggtgaaggattccgggctgacaaagccctgacgcgccgcaaacagcgttccggcaaaaccggcaaacgcggcacttatggtaaaggcagtcagcttgatacgacgcgggcttaagcccaggctacggcaggcgatttcatcttcacgcaacgcttcccacgcacgccccagcggcatccgcagcaggcggttaatgacaaacaggcttagcaccaccagcagcaacgccaccaggtagaggaagatgacacgatcggagggatcgtatttcaggccaaagaaattactgaacgtgtcccagccgccttcacgagcggtacggctgaactcgagtccgaagagtgtcggtttcgggatctgactgattccgttcgggccgccggtaatttcggtgttattgagcagcaatatgcgcacaatttcgccgaaaccgagggtaacgatcgccagatagtcaccgcgcaaacgcagcaccggaaaaccgagcaggaagcccgccgccgctgccattaatccagcaatcggcaggcaggtccagaagcccaagccgtaatagtgattgagcagcgcaaaagtgtaagcgccgatggcgtaaaaaccgccgtaccccagcaccagcagaccagaaagaccaacaaccacgttcagcccgagaccgaggataatgtagatcatggtcagggtggcaatatccaccgtcccgcgactaaccataaacggccacgccaccgcaagcaccaacagcgccacgaggaacagtttctgcttcaccgtggagccatcaatggcgggcagaataaacttcggtccggaaacgcttttcaaccctttctggaaagccggtcgcaaaagctggaagaaaaagaccaccgccgtgccgataaacacccactgccaacggacatcgctagccgtgtcgaccaccagtttggtgccatccagctccagttgcacgcccataaagacgcccgccagcacaaagaacatcgcggcagagagcagcgccattgcaatatgcatcggtttcatactttctctacctccgggcgacccagaataccggtcggcatcaccagcagcaccagaatcagcagggcgaaactgaccacatctttatattccgtactcagataggcagaagagagcgcctccgcaatccccagaatcaggccgccaatcatcgctcccggaatgctgccaatcccaccgagcaccgccgcggtaaaggctttcatcccggccataaagccgatgtaggggttaatgacgccgtagaactgaccgagcagcacacccgccaccgccgccatcgccgcgccaatcacaaaggtcagcgcaatcacccggtcggtgttaatgccaagcagactcgccattttcagatcttccgcgcaggcacgacacgcgcgacccatgcgggaatagcgaatgaaaatcgtcagcgccagcatggcgaggaaggtaacaatccagatcaccgcctgcatggtggtaatagaggcagagaagttttcgctatgccccaccacccactgaccgttaaacaggctcggcagcgccacgtcgcggctaccttcggtcaggctgacgtagttttgcaggaagatggacataccgattgcagagatgagtgcaatcaggcgcttagagttacgcaccgggcggtaagccacccgttcgatactccagccgtaggcgctggcaatgacgattgcgccgacgaatcccgcagctaccagcagccagccggtatcaatgcccatcatcatcagcgcggcgatgatcataaaactgacgtagctgccaatcatataaacctcgccgtgggcgaagttgatcatgccgataatgccgtaaaccatggtgtagccgatggctatcagcgcgtaggtactgcccagcgtgacgccgttaaacatctgctgcaagaaatacaaaaactgctcagacataaggtaacctttctaaacccgcccgcattttacgggcggtgggatgatcacttggctgccgtggaactaccgtcggcgtgccactggaagacaccaaaatcaaatcccttaagatcgcctttttcatcccagttcagcggcccaatcacggtgtttgcaccgttagcttttaaatctttcaccagcgccagcggctcatcgctgccggtacgctcaagggcagtcgccagagattgcaccgccgcgtaggtgatccagacataaggcccggacggatctttcttgtctgctttcagcgcatcaacgatgccctggtttgccggatcctggtcatagcgttttggcatagtgaccaacatgccttcggcggcatcaccggcaatgttgctcaagctcgcattacccacaccttccggccccataaactgggttttcaggccaacggaacgggcctggcgcagcatctgccccatttccgggtagtaaccgccgtagtaaacgaagtcgatgttttcttttttcaggcgggcgatcagcgcggagaaatctttctccccggcggtaataccgtcgaagaagacgacgttggcgttagccgctttcagcccgtcctgcacgctacgcgccagcccttcgccatactgttgtttgtcgtgaatgatggcgatgcgctggggcttcaccgtctcaagaatgtattttgccgccgttggcccctgggaagagtccagcccggcagtacgcataatgtgttgataaccgcgttgggtcagctccgggttggtcgctcccgggctgatcatcagaataccttcgtcttcatagatatcactcgcaggctgggtagaagaagaacacagatgaccaataacgtatttaatgccgtcattaacgattttgttggcgaccgcaacggcttgtttcgggtcgcatgcgtcgtcatattccacgccaaccagtttatcgcccttaattccccctttggcattaatgtctttaattgcctgacgcgcgccgttaaattccatatcgccccactgggcaatcgggccggacatcgcgccgacaacggcgactttaatatcgtcagccatagcggtgtgactaattgccagtgcaatcatccctgcgatgatagttttcgcattccgtttcatagtcaaaaatccccattcgtgatgttgtgttgctttgtttttatgtgttaacaaatcagactgttctttttttatactgcactgtttttgcctgtctgattaaggggttagcgcagtattttgtgataatagcgattaaaatccctatttttcagtcgattaagaacagataatattctgaatttattgatagataaacagaaaaaagtgcctttgtcagcataaaataacggcacaaagggcggaataattcactatcattcaggggattatgctggacatttttcattctctaatgttttaattttgtaattattgctgttaaaaaattaatcacctgccaaaagaaataaaaaagagaaagcctccgattaaattatttcgctacactggttccacttttgtgatttacacgggttacccatgaagctgaccatcattcgattagaaaaatttagcgaccaagaccggattgacctgcaaaagatctggccggagtattccccttccagcttacaggttgacgataaccaccgtatctacgccgcgcgttttaacgagcgcctgctcgctgccgtgcgggtaaccttaagcggcaccgagggagcactggattccctgcgcgtgcgggaagtcacccgccgtcgcggtgtggggcaatatctgctggaagaggttttgcgtaacaatcctggcgttagttgctggtggatggcggatgcaggcgtggaagatcgcggtgtgatgacggcgtttatgcaggcgctggggtttacggcacaacagggcggctgggagaagtgttaatcgtcaagtttgatttcaaaagtgatattgcctgatgcgctacgcttatcaggcctacaatgtgtgttgcaatttactgatttctttggatcttgtaggccggataaggcgtttacgccgcatccggcatgaagcaacgtactcgatattagcaatttggcggcaacccaaagttgccgattaatgattacttcgcatcggtcgccgtgccgttggcgtgccagtcaaatacgccgaactcaaagcctttcagatcgcctttctcatcccaggtcagcggtcccattacggtatccacggagttcgctttcaggtatttggcgatttcagccggatcgtcagactgattcaggcccgcctgcaaagattgcagcgcggcgtaggtggtccaaacgaatgcgccacttgggtcctgttttttcgctttgatcgcgtcaacaatgggtttgttcgccggaacctgatcgtagttcttcggcttggtcaccagcagcccttccgcactttcgcccgcaatgttagacaggctaacgttagccacaccttccggccccataaactgagttttcagccctgccgcgcgtgcctgacgcaggatttgccccatttccgggtgataaccgccgtagtaaacgaagtcgatattctcttttttcagacgcgccaccagcgtactgaaatctttttccccggcggtgatgccatcaaagaacaccacgtttgcattgcctttcttcaggccgtcctgcaccgctcgcgccagaccttcgccgtattgctgtttgtcgtgaacgatagcaatacgctgcggtttcactttctcaagaatatatttcgccgccgtcggcccctggtcggagtccaggccggtggtgcgcaggatcagctgatagccacgggcggtcagctccggcgcggttgccgctggggtgatcattaaaatgccttcgtcttcgtagatgtcagacgcaggctgcgtactactagaacagaggtgaccaatcacatatttaatgccgtcgttaacgactttgttcgccaccgcaaccgcctgtttcgggtcacaggcatcgtcatattttacgatttgcagtttgttgcctttaatgccgcctttagcgttgatatccgcaaccgcctgctctgcgccggtaaactcctggtcaccgtactgcgcaaccggaccggacattgcgcccacgaccgcgactttaatatcttctgccagagccatattgctgaatgccagcgcgatacatcctgccagtaacgctttaccctttatgttcatcctgagaatccccattcttctggttattacgtgtgttgtgatgttgtttttcagcactttatttcgttttatgcatgactacccgtgctttagcagcatactctgctaaaacatacccgatttttatgatattggaatagctattttgacagtttattaacaatctgcgtggggattggcgttttgccggaggggaaattgattattacagaggcccaaaaaacaaaaaccccggactctcatccagggttctctgcttaatagcggaaattacgcttcaatggcagcacgcaattttttcatcgcgttcttttccagctggcgtacacgctcagcggaaacgccgtaacggtcagccagttcctgcaacgtggacttgttgtcttcgtccagccagcgcgcacggatgatgtcctggctgcgttcgtccagaccctgcatcgcgtcggtcagacggtttgccgcctgctcttcccagttatcatcttcaatgccgtcggcaaagttagaacttttatcctgcagatagagcaccggagccatcggctggctgtcggaatcgtcgtcggaagacaggtcaaaggtcatgtcctgtgccgccatacgactttccatctcacgtacgtctttgctggttacgcccagttcacgggccaccatttcgacttcatcctggttaaaccagcccagacgctgcttggttttacgcaggttgaagaacagtttgcgctgcgctttggtggtcgcaactttgacgatacgccagttacgcagaacgtattcgtggatctctgctttgatccagtgaacggcgaaggagaccaggcgcacacccacttccgggttgaaacggcgcactgctttcatcaggccgatgttaccttcctgaatcaaatccgcctgtggcaggccatagcccgcataattacgagcaatatgaacaacaaaccgcaggtgagacaggatcagcgttttagctgcttccagatcgccatggtaatgcagcttttcagccagcgcccgctcctcgtcagcgctcaacatcggccacgcgttagctgcccggatgtaggaatccaggttgccaactggggctaaagctaaactttgcattttgtcagtcattcaaatcctctcaatcgatatcttctggcgcttcagtggtagcaacaactgtgccagagcttaagagcaacgaggttatcattcactgttttatcagaccgtgattttatccacaagttcaatgcaagcttgtgaataaattacgcacaaaatgtgacatagagatgaaataccgggaagagacaacggggtctctttccctgctacggaacccattgcagggaaagagtataacacgcttttattattcaggcgtaaagtggcgtaaatgttgtaccgtggcaagccacgctgccacccagccaatcatgctgcataccagcagcaatagcaggcattcatcgaaacttaagccattgatatcaaacttcgttccgaaaacctgtgccacttccgcaaccgcgctactcaatcgcagcaccagaatttcactcaaaattaaactcaacaatgcgccagaaaatcccagcagtgcgccaccatacaggaacgggcgcaggatgaatccatctgtcgcaccaatcagtttctgtacgttaatggagtcacggcgagcaaagatactcagacgcacactgttaccgatgacgaggaacacggccgccaccatcaacacgccgatcatcgcgctaacgcgcccgaccagcccggtcaacgccgccagacgggcaaaccagctgtcatccatccgcacttcgtcaatgccgttaatctgcgtgatacgatcacgcagcgtattcagactttccgtcccctggaaatcgagtttcgggatcaccaccgccactgccggaagcgggttttcttccagcatatccagcgcaccaccaaaaccagaccagttacggaactcacccagtgcgtcttcacgagaaagatagttcactttctccacgccttgctcggcctgcaactgtgccaccacgcccgcagcagcgtcatcgtccagcgttttttgcagataaacagtgatttgcggactcggataatactgcgtcgccgcctggttaacgtttttgtacaccatataacagacgctgggcagcgtcagagaaatggcgataaccatcaccgttaaaaacgtggcgaacggtttgcttttcagatcctgcaatgcgccgtggaaggcatagcgcacctgttcgttgaaaacgttggttttgcgatttaccggttttgggctggatttcgcgcgttttggtgcgttacgaccgccgtcgccactgccgccgacgcttttacggaagcgatcaagacgcccgccaaactgccgaatatgattgattgcatcgcgcttattcatggcccacgcctccatgcaagtgaccatcgctcagggtgagcatgcgataggaacgccggctgatcaggttgatgtcgtgcgttgccatcaatacggttaccccaacgcggttaaactcttcaaacagacgtaaaatgccttcgctcagcgcgtcgtccaggttaccagtcggttcgtccgccagcagtaccgcgggcttgttcaccaccgcgcgggcaatgccaacacgctgttgttcaccgccgctaagctgaatagggaagttcttcgctttgtccagtagcccgactttatccagcgccgcgctcacccggcgacgaatatcgtcaccgctggcaccggcgataatcagcgggatcgccacgttatcgtagacagtacggtccatcagtagatggtgatcctggaaaatcatgccaatctggcggcgcagaaacggaacttcacggtttttcagacgcgtgatgtcatggccgctaaaccagattttcccggcgctgggccgctcaatcccacagatcagcttcaggagggtacttttccctgcgccggaatgaccggtcagaaacgccatctcacccggctgcatatggaacgtaacgccctgcagcgcctgtctcccaccgagataagccttgctgacatgttcaaagcgaatcattgttaatcctctcgggcaaaaagtgcctctataaagtcgtccgccttaaacggacgcaaatcctcaatacgttcgccgacaccaatgtagcggatagggataccaaactggtcagccacgctgaaaattaccccgcctttcgccgtgccgtccagtttcgttagcgtgatgccggttaagccaacggcttcatggaacagtttggcctggcttaccgcgttctgcccggtgctggcatcaatagtcagcataacttcatgcggcgcttcaacgtcgagtttcttcatcacgcggacgattttcttcaactcttccatcaggtggcttttgttctgcaggcgtccggctgtatcggcaatcaggacgtcgatattacgcgctttagctgcctgaatggcgtcgaagataacagaggcggaatccgccccggtatgctgggcaatcaccggaatattgttgcgctgaccccagacctgaagctgttcaaccgcagctgcacggaaagtatcacccgccgccagcatcacgcttttaccctgctgctcaaactgacgcgccagcttaccaatcgtcgtggttttacccacaccgttgacgcccaccatcaggatcacaaacggcgctttgccttcaacattcagcggctcatcgactttcgccagaatctcgcccatctcttctttcagcaggccatagagcgcctcggcgtcacgaagctgcttgcgggatgcgccttccgtcagattggtgataattttacgtgtggtttccacacccacatcggcgatcaaaagctgctcttccagctcctcaaacagatcatcgtcgatttttttaccgcggaacaggctgataaatccggaaccgagattttctttggtttttaacaggctgcgtttcaggcgcgcgaaaaaaccttctttggtcggtttttcctgctcctgagcgatttcttccaccggctgctcttcttctgccggaggaaccaccatcaccgcctcttctgccgcttcggcagccagcgccgtttccagctcttcgtcggtaatttcttctttagccgcttcttcttccgccgcttcgacaatctctacggtttccgcttcagcctgccactcttctgggctaaccgcttcggcgttgacgtcttccggcaacggcagctcttcacgttcgatagccactggctccggcgtttcttctacgaccggttccggctgtgcaacgacttccgcttcaggctgcgctttttcactttcagcaacctgttcagtgacttccacaacgtcggcagcaaaagtttccgcctcggcttcagtatgcgcttgcggctgctcttcaacggcttgttcagaggccttcacaggctcttgcgcctgaacgatttcttctacaaccggttgttcattctgaacttctgtctctttttccggggtctgctctttttgaccaaagcccagccaggaaaaaaagccacgttttttttctttcgccatttgcgactacactcctcgctgttgcttcatggcacagcgttaacgctatgtacatagcagctaaaaaaatgatgaaatagtctatcacttaacttaattcacatcaccgcctgcaagtatgtgttatctggcggattgagcaatttatcatgaaaaaaccgaatcattccggcagcggccaaatccgcattattggcgggcagtggcgaggccgtaaactcccggttcctgatagcccaggtctgcgccccaccaccgaccgcgtacgcgaaacgttgtttaactggctggctccggtcattgttgacgcccaatgtctggattgcttcgccgggagcggcgcgctggggctggaagcgttaagccgctacgctgcgggggcaacgttgattgagatggatcgcgcggtttctcagcagttaattaagaatctggcgacactaaaagcaggcaatgcacgcgtggtgaacagcaacgcgatgagtttcctggcgcaaaaaggtacaccgcataatatcgtgtttgtcgatccaccgttccgccgtggcttgttagaagagacgataaatttactggaagataacggctggctggctgacgaagccctgatttatgtcgaaagcgaagtcgaaaacggtctgcccactgttccagcaaactggagtttacatcgggaaaaagtggcgggtcaggtggcttatcggctgtatcaacgcgaagcacaaggagaaagtgatgctgattaatattggtcgtttgttaatgctctgcgtttggggatttttaatcctcaacctggtgcatcccttcccacgcccgctgaatatcttcgttaacgtggcgctgatttttaccgtgctgatgcatggtatgcagctggcgctattgaaatccactttaccgaaagatggcccgcagatgaccaccgccgaaaaggtacggattttccttttcggcgtgtttgaactgctggcctggcagaagaaatttaaagttaaaaaataaccttattgttcgcctacaaagctgacaaagcgcgttcctttatagctcagcgtacctttatcgcccactgtcagggcgtggtactgctgggcgtcgaggcgaaacgtctgctccattcctccgctttgcggtttgaagcttgcctcatagcgtatactggtgcctgccggagtcacttcctgctggcggctacggcgatcgttaatcggtttttcccgcttgttgctcaccaccaccagcttttgctggagcggagccatatcattatcagctttttcccgtcgctgttgcataaaacgaaagcttgcggcgacgacaattaagccaatgataacaataaagaaaagaggtggtttgctcatctttatccctcatcggaaaatgcggaaataagcataccctgccagttatggtgttgtcatccgtccaccctcgccactaaactggaagcaagaccgtaggcattccgcttacgaaaaaataacgaattcaaggaactaagatgctttggagctttatcgctgtctgtctttccgcatggctatctgtggatgcaagctatcgtgggccaacctggcaacgctgggtgtttaaaccgttaacccttcttctcctgctgttactggcctggcaagcgccgatgttcgacgccattagctatctggtgctggcagggctgtgcgccagtctgctgggcgatgcgctaaccctgttgccacgtcaacgtctgatgtacgccatcggcgcgtttttcctcagccacctgctgtacaccatctatttcgccagtcagatgacgctctctttcttctggcctctaccactggtgctgctggttctgggtgcgctgttactggcgattatctggacgcgcctggaagagtaccgttggcctatctgcacgtttatcggcatgacgctggtgatggtgtggctggcaggtgaactgtggttcttccgtccgaccgctccggcgctctctgcgtttgttggcgctagcttgctgtttatcagtaactttgtctggctggggagccactatcgccgacgcttccgtgcggataacgcgattgctgcggcctgctactttgccggtcacttcctgatcgtccgcagcctgtatctctgataaaacttgactctggagtcgactccagagtgtatccttcggttaatgagaaaaaacttaaccggaggatgccatgagcactcctgacaatcacggcaagaaagcccctcaatttgctgcgttcaaaccgctaaccacggtacagaacgccaacgactgttgctgcgacggcgcatgttccagcacgccaactctctctgaaaacgtctccggcacccgctatagctggaaagtcagcggcatggactgcgccgcctgtgcgcgcaaggtagaaaatgccgtgcgccagcttgcaggcgtgaatcaggtgcaggtgttgttcgccaccgaaaaactggtggtcgatgccgacaatgacattcgtgcacaagttgaatctgcgctgcaaaaagcaggctattccctgcgcgatgaacaggccgccgaagaaccgcaagcaagtcgcctgaaagagaatctgccgctgattacgctaatcgtgatgatggcaatcagctggggtctggagcagttcaatcatccgttcgggcaactggcgtttatcgcgaccacgctggttgggctgtacccgattgctcgtcaggcattacggttgatcaaatccggcagctacttcgccattgaaaccttaatgagcgtagccgctattggtgcactgtttattggcgcaacggctgaagctgcgatggtgttgctgctgtttttgattggtgaacgactggaaggctgggccgccagccgcgcgcgtcagggcgttagcgcgttaatggcgctgaaaccagaaaccgccacgcgcctgcgtaagggtgagcgggaagaggtggcgattaacagcctgcgccctggcgatgtgattgaagtcgccgcaggtgggcgtttgcctgccgacggtaaactgctcagtccgtttgccagttttgatgaaagcgccctgaccggcgaatccattccggtggagcgcgcaacgggcgataaagtccctgctggtgccaccagcgtagaccgtctggtgacgttggaagtgctgagtgaaccgggagccagcgccattgaccggattctgaaactgatcgaagaagccgaagagcgtcgcgctcccattgagcggtttatcgaccgtttcagccgtatctatacgcccgcgattatggccgtcgctctgctggtgacgctggtgccaccgctgctgtttgccgccagctggcaggagtggatttataaagggctgacgctgctgctgattggctgcccgtgtgcgttagttatcagtacgcctgcggcgattacctccgggctggcggcggcagcgcgtcgtggggcgttgattaaaggcggagcggcgctggaacagctgggtcgtgttactcaggtggcgtttgataaaaccggtacgctgaccgtcggtaaaccgcgcgttaccgcgattcatccggcaacgggtattagtgaatctgaactgctgacactggcggcggcggtcgagcaaggcgcgacgcatccactggcgcaagccatcgtacgcgaagcacaggttgctgaactcgccattcccaccgccgaaagtcagcgggcgctggtcgggtctggcattgaagcgcaggttaacggtgagcgcgtattgatttgcgctgccgggaaacatcccgctgatgcatttactggtttaattaacgaactggaaagcgccgggcaaacggtagtgctggtagtacgtaacgatgacgtgcttggtgtcattgcgttacaggataccctgcgcgccgatgctgcaactgccatcagtgaactgaacgcgctgggcgtcaaaggggtgatcctcaccggcgataatccacgcgcagcggcggcaattgccggggagctggggctggagtttaaagcgggcctgttgccggaagataaagtcaaagcggtgaccgagctgaatcaacatgcgccgctggcgatggtcggtgacggtattaacgacgcgccagcgatgaaagctgccgccatcgggattgcaatgggtagcggcacagacgtggcgctggaaaccgccgacgcagcattaacccataaccacctgcgcggcctggtgcaaatgattgaactggcacgcgccactcacgccaatatccgccagaacatcactattgcgctggggctgaaagggatcttcctcgtcaccacgctgttagggatgaccgggttgtggctggcagtgctggcagatacgggggcgacggtgctggtgacagcgaatgcgttaagattgttgcgcaggagataaggcaaaccgatcgcaacattgagcgcgatcggtcccctcgcccctctggggagagggttagggtgaggggaaaaggcggcatcgaagccaatcagcccctatcaaccgcctttacgaatcaaataacgataaggcagtccatccgtctctttagcaaccagttcgtgttccataaaggtacaaaacccaggaatatcgcgggtagtggccggatcgtcggcgataatcagcaacgtttcgccaggctgcatattgcgcacggttttgcgcaccatcatcaccggttccgggcagcgcaggccaagcgcgtcgagtgtgtggtcagggctggaaaagagatcggtcattttcttctcatcacttaaaaaaacggcgctagtttacgccctgtgagtccgtaagcaaactaggttaacgattgcgtgaaaattaaccattgcattgtcaacgtaaagcagtatcatgcggcggctcgaaaaaagggtaagcacgttattatgttaaggtaacagacgtgtcgtacgtattgggttccctcaccccaatggttaatcaaaaaggtacaatatgaacgttttcagccaaactcaacgctataaggcgttgttctggttaagcttatttcatctgctggtgatcacctccagtaactatctggttcagcttcccgtctccattttgggtttccataccacctggggcgcgtttagctttccgtttatttttcttgctaccgacctgaccgtgcgtatttttggcgcaccgctggcccgacgcattatcttcgcggtaatgatccctgcgttattaatctcctacgtcatcagcagcctattctatatgggttcctggcagggattcggcgcactcgcccacttcaacctgtttgtcgcccgtatcgccaccgccagtttcatggcctacgcgctggggcaaatcctcgacgtgcacgtttttaaccgcctgcgtcagagtcgccgctggtggctggcaccgacagcgtccacactgttcggtaacgtcagcgacacgctggcctttttcttcattgccttctggcgtagcccggatgcctttatggctgaacactggatggaaatcgcgctggtcgattactgtttcaaagtgttaatcagtatcgttttcttcctgccaatgtatggcgtattactcaatatgctgttgaaaagactggcagataaatccgaaatcaacgctttgcaggcgagttaaaggttcgttatcagagttgtgataagatggatgaatgagccgttatggccgtttatcgaaaggaagaagtcaatgcgcaatctggttaaatatgtcggaattggcctgctggttatggggcttgcggcctgtgatgataaagacactaacgctacggcgcagggtagcgtcgcggaaagtaacgctaccgggaatcccgtcaacctgcttgatggcaagttaagtttcagcctgccagcggatatgaccgaccagagcggtaagctgggaacgcaggccaataacatgcatgtctggtccgacgccaccgggcagaaagcagtcatcgtcatcatgggcgatgatccgaaagaagatctggcggtgctggcgaagcgtctggaagatcagcaacgtagccgcgatccgcagctgcaagtggtaaccaataaagccattgagctgaaaggtcacaaaatgcagcagttagacagtattatctccgcgaaaggccagacggcgtactcttccgttattctgggtaacgtgggtaatcaactgctgaccatgcaaattacgctgcccgctgacgatcagcaaaaagcgcagaccaccgcagaaaacatcattaatacgctggttattcagtaagttttaagaactactggcggcctcagggacgtgttccggaggccgtttttttaatcgccacgtcagtaataacgcgattgcgaccagtcccgccgccgccagataaatcaccggtacgcccgcccagctcatcaccagcccagccagtggtccagtcacgccaaggcttaaatccataaatacggtgtaagttgccagcgccgccccctgattttgctgcggaaccgcttttaccgccactacacccaatgccgggaacaccaggctaaacccggcccccgccagtaagacgccgattttcgccatccacggcatagtcgccacgccaaccagtagcaggccgattatctcaacgctaaagcaaatcatcgctacgtttaagccaccgatacggttaatgccgttagggaataacaaacgcgtaccgacaaacgcacagctaaacagcgtcagcgcgaaagccgcaccgtcccaacctttagcgtcataaaacagcgtgataaaggtggcgatgacgccaaatccggcggaagccagtgccagcgccataccgtacagccagacgcgcccaagcaccgcgcgaaacggcagcggtttgcctttactggcttttaccgtcggacgcgggatcgccaacaaaatggccaccagcgccacgcccataatgattaacgctaacgcctgcaagccgccccagtgataaaacacgacgcctaacggcgcacccatcgccatcgccccgtaagtgacaatgccgttccagctaatcacccgcccgatatgcaggctgccaaccacgccaacgccccatagggtgcttcccgttccggcaaaactttgcccaatcccaaggatgacgcgccccaggcaaagtaataacaggctgatgacaggcagactggcggttaatcctgccgtcagataccccagaccgctcaaaaagcagccgcataaaccgaagacgacaatctttttgggtcccaggctatcggcgtaacgtccggcatgagggcggctcagcaaggtggcgaaatattgcaggctgataaccaatcctgcccagaaggcgctaaagcccatcacatcatggacatagcccggtaatacagcgagcggcaacccgatggtgaggtagctggcgaagttaaacatgactatagagacaatgcgcaaattcaggcgcaatccgtttagcgcgggttcggctacgggttcgggcatgaggatcaccacatttttacaacagtgtttcatttttaccacgtgctgacgtgaaaatcagcagtaagaatcagaatattgctggcgtgactcccgctacacttaatacaaaaagtcacaaggaagccccaatggaaacccctcaacccgataaaacgggcatgcacattctgctcaagctggccagcctggtagtgatcctcgcgggcattcacgcagcggcagatatcattgtgcagctgttactggcgctgttttttgccatcgtcctcaacccgctcgtcacctggtttattcgtcggggagtacaacgccccgttgccattacgattgtagtggtggtgatgctgatcgcactaaccgcgctggtcggcgtactggcggcaagctttaacgaatttatctctatgctgccgaagtttaataaggagctgacgcgcaaactttttaaattgcaggagatgttgccttttcttaatttgcatatgagcccggagcgaatgctgcagcggatggacagcgaaaaagtggttaccttcaccacagcgctaatgaccgggctttccggggcaatggcgagcgtgcttttgctggtgatgaccgtagtttttatgctgtttgaagtgcgccacgtcccttacaaaatgcgttttgcgctgaataatccacagattcacatcgcgggattacaccgcgcacttaaaggcgttagccactatcttgcattgaagacgctactcagtttatggacaggtgtcatcgtctggctggggctggagctgatgggggtgcagtttgcgctgatgtgggcagtactggcgtttttgctcaactacgtgcccaatatcggcgcggtaatttccgccgtaccgccaatgattcaggtgctgctgtttaatggtgtttacgaatgtattctggtcggcgcattgtttttagtggtccatatggtcatcggcaatattttagaaccacggatgatgggccatcgcctggggatgtccaccatggtggtatttcttagtttgttaatttggggatggctgctcggcccggtagggatgctacttagcgtgccattaaccagcgtgtgtaaaatctggatggaaaccaccaaaggcggtagcaaactggcgattttactggggccgggcagaccgaaaagtcggttaccgggatgaggcgacaagtgatacgatacgcactttcattttccattaaacgttggccctgatatgtatcggatagttctggggaaagttagcaccttaagcgcagctccactgccaccgggtttacgcgagcaagcaccgcaaggtccacgacgcgaacgctggctggcggggcgtgcattgcttagccacacgctttccccgctaccggagatcatctatggcgaacaaggcaaacctgcatttgcgccggaaatgccgctatggttcaacttaagccatagcggtgacgatatcgccctgctgttgagtgatgaaggcgaagtcggctgcgatatcgaagtgattcgcccgcgcgccaactggcgctggctggcgaacgccgtattcagcctcggggaacacgctgagatggacgccgtgcatcctgatcagcaactggaaatgttctggcgcatctggacgcgcaaagaagccatcgttaaacagcgtggcggcagcgcctggcaaatcgtcagcgtagacagcacctatcactccagcctgagtgtcagccattgtcagcttgaaaatttaagccttgcgatctgcacccctactccctttacgctcaccgccgacagtgtgcaatggatcgatagtgttaactgatccgcccacccgactgcccatctattgatccagaacaggtaatcagtatgacgaatacttaaaatcgtcatacttatttccgccatctattttaatccattggggttaccatgctctccacactccgccgcactctatttgcgctgctggcttgtgcgtcttttatcgtccatgccgctgcaccagatgaaatcaccaccgcctggccggtgaatgtcgggccactaaacccgcacctttacacgcctaaccagatgttcgcccagagcatggtttatgaaccattggtgaaatatcaggcagacggtagcgtgatcccgtggctggcaaaaagctggactcatagtgaagatggtaaaacctggaccttcaccctgcgtgatgacgtgaaattctccaacggtgaaccgttcgatgccgaggcggcggcagaaaacttccgcgcagtgctcgataaccgtcaacgtcacgcctggctggagctggcaaaccagattgttgatgttaaagcactcagtaaaacagagctgcaaattaccctgaaaagcgcctactatcctttcctgcaagaactggccctgccccgtcctttccgttttatcgctcccagccagtttaaaaaccatgaaaccatgaacggaattaaagcgccgattggcaccggaccgtggattttgcaggaaagcaaactgaatcagtacgatgtcttcgtccgtaacgaaaactactggggcgaaaagccagcgattaaaaagatcacctttaacgtcatcccggacccgactacccgcgcggtggcgtttgaaactggcgatatcgacctgctgtacggaaacgaagggttattaccgctcgataccttcgcccgctttagccagaatccggcttaccacacccaactgagtcagccgatcgaaaccgtgatgctggcgctcaataccgccaaagcccccaccaacgagctggcagtacgtgaagctcttaattacgcggtaaacaaaaaaagcctgattgataacgcgttgtatggcacccagcaggtcgccgacaccctgtttgccccttctgtgccctacgccaacctcggcctgaaaccgagccagtacgatccgcaaaaagcgaaagcgttgctggaaaaagccggttggacgctgcctgcgggcaaagacatccgcgagaaaaatggtcagccgctgcgcattgaacttagcttcatcggcaccgatgcgttaagcaaaagcatggcggaaatcattcaggctgatatgcgccagattggcgcagatgtcagcctgattggcgaagaagagagcagtatctatgctcgtcagcgcgacggtcgttttggcatgattttccaccgcacctggggcgcgccatatgatccacacgccttcctcagtagtatgcgcgtaccgagtcacgctgacttccaggcacagcaaggattagccgacaaaccgctgattgataaagagatcggcgaagtgctggcgacccatgacgaaacgcaacgtcaggcgctgtatcgcgacattctgacccgtctgcatgacgaggcggtttatctgcctatcagttacatcagtatgatggtggtaagtaaaccggagctgggtaacatcccctacgcgccgatcgccaccgaaattccgttcgaacagattaaaccggtgaaaccttaatgttgcgttacgtattacgccgctttctgctgctgatcccgatggtgctcgccgccagcgtgatcatttttctgatgctgcgcctcggtaccggcgacccggcgctcgattatttgcgtctgtctaacctgccgccgacgccggagatgctggcctctacccgcaccatgctgggactggatcagccgctgtacgtccagtacggcacctggttgtggaaggcgctgcatcttgactttggtatcagtttcgccagccaacgcccggtactggacgatatgctgaacttcctgcccgccacgctggaacttgcaggtgcggcgctggtattaattctgctcacttccgtaccgctcggtatctgggcggcgcgccatcgcgaccgtctgccggatttcgccgtacgtttcatcgcgtttcttggcgtgagcatgcctaacttctggctggcgtttttactggtgatggcgtttagcgtgtatctgcaatggctacccgcgatgggttacggcggctggcagcacatcattttgcctgcggtttccattgcctttatgagcctggcgattaacgcgcgtttactgcgcgccagtatgctggacgtcgccggtcagcgtcacgtcacctgggcgcgtctgcgcggcctgaacgacaaacagaccgaacgtcgccacatcctgcgcaatgccagcctgccgatgatcaccgccgtggggatgcatatcggcgaactgattggcgggacgatgattatcgaaaacatctttgcctggccgggcgtcgggcgctatgcggtgagcgcgatttttaaccgtgactatccggtgatccagtgctttacgctgatgatggtggtggtttttgtggtctgtaatttgattgtcgatttgctcaacgccgcgctggacccgcgcattcgtcgtcatgaaggagcgcacgcgtgaactttttcctctcttcccgctggagcgtacgcctggcgctgatcattatcgccctgctggcgctgattgcgctcaccagccagtggtggctgccgtatgacccacaggcgattgatttgccgagccgcctgcttagcccggatgcgcagcactggctgggcaccgatcacttaggtcgcgatattttcagccggctgatggcagcgacccgcgtgagcctcggtagcgtaatggcctgcctgctgctggtgctgacattagggctggttattggcggcagcgccgggttgattggcgggcgcgttgatcaggccaccatgcgcgtcgccgatatgtttatgaccttcccgaccagcattctgagcttctttatggttggcgtgctcggcaccgggctgaccaacgtaattatcgccatcgccctgagccactgggcgtggtatgcacgcatggtgcgcagcctggtgattagtctacgccaacgcgagtttgtgctggcgagtcggctttccggtgcgggccatgtgcgggtgtttgtcgatcatctggcaggcgcggtgatccctagcctgctggtgctggcaacgctggatatcggccatatgatgctgcacgtcgcggggatgtctttccttggcctcggtgtgaccgcgccgaccgccgaatggggcgtgatgattaacgacgcgcgccagtatatctggacccagccgctgcaaatgttctggccggggctggcgctgtttatcagcgtgatggcctttaacctggtgggtgacgcactgcgcgatcatctggaccctcatctggtgacggagcacgcacactaatgccgcaacagattgaactacgtaatatcgcgctacaggccgcgcagccgctggtacacggtgtaagcttaaccctgcaacgcgggcgcgtgctggcgttagtcggcggtagcggcagcgggaaaagtttaacctgcgccgcaacgctgggcattttgcccgctggcgttcgccagacggcgggggaaattttagccgatggcaaaccggttagcccttgcgccctgcgcggcatcaaaattgccaccatcatgcagaacccgcgcagcgcctttaatccactgcacaccatgcacacccacgcgcgggaaacctgcctggcgttagggaaacccgccgatgacgctacgcttaccgctgccatagaagcggtggggctggaaaacgccgcgcgcgtgctgaagctgtacccgttcgagatgagcggcggcatgttgcagcgcatgatgattgcgatggcggtgctgtgtgaaagtccgtttatcatcgccgatgaaccgaccaccgaccttgacgtggtagcacaggcgcgcatcctcgatctgctggaaagcattatgcaaaaacaagcgccgggaatgctgctggtgacccatgatatgggcgttgtggcgcgtctggcggatgacgtggcggtgatgtctgacggtaagattgtcgaacagggcgatgtagaaacgctgtttaacgcccccaaacatacagtgacgcgcagcctggtttccgctcatctcgccctctacggtatggagctggcaagttgacctaatacggtatggagctggcatcatgactttacttaacatctccggcctttcccatcactatgcgcacggtggatttaacggaaaacatcaacatcaggcggtgctgaataacgtttccctgaccctgaaaagcggcgaaaccgtcgccctgctggggcgcagcggctgcgggaaaagtaccctcgcgcggttgctggtgggtttagaaagccccgcgcaggggaatattagctggcgtggcgaaccgctggcgaaactcaatcgcgcccagcgtaaagcgttccgccgcgatattcagatggtatttcaggactccatcagcgccgtgaatccgcgcaaaaccgtgcgcgagatcctgcgtgaaccgatgcgccacctgctaagtctgaaaaaatccgaacaactggcgcgcgccagcgaaatgctgaaggcggtcgatctcgatgacagcgttctcgacaaacgcccaccgcagttaagcggcggccagctccagcgcgtctgcctggctcgcgcgctggcggtcgaaccgaaactactgattctggatgaagccgtttctaaccttgatctcgtgttacaggcgggtgtcattcgcctgctgaaaaagctacaacaacagtttggcaccgcctgcctgttcatcacccacgacttacgcctggtagaacgcttttgccagcgggtaatggttatggacaacggacaaatcgtcgaaacccaggtggtgggagagaaattaaccttttcctctgacgccggacgtgtgctacaaaacgcggtattacccgcattccccgtgcgccgtcgcaccacagaaaaggtttaacgcaaatgcaacgagtcaccatcacgcttgatgacgatttactggagacgctggacagcctgagccagcgtcgtggttataacaaccgttccgaagctatccgcgacattctgcgtagcgccctggcgcaagaggccacccagcagcacggcacgcaaggtttcgcggtgctgagctatgtgtatgaacacgaaaaacgcgacttagccagccgcattgtctccacccagcatcatcaccacgacctctccgtcgccacgctgcatgtgcacatcaaccacgacgactgtctggaaatcgccgtgttgaaaggtgacatgggtgacgtgcagcattttgccgatgacgttatcgcccagcgcggcgtgcggcacgggcatttgcagtgcttgccgaaggaagattgagttacgccattgtcccaatcgtcttcctgaatcgcagcagcgcaatggtgaaaaatgcgccgccaattgccatcagcgtcagaaactgcggccagacgatttcgaatccggcaccccggtagaggatggcctgcgcgaggctaacaaagtgtgtcgtcggcatggtcagcataatgtcctgcaccatctgcggcatactttcgcgcggcgtggaaccaccggaaagcatttgcagcggcagcagcaccagaatcaccagcagccccagttgcggcatactacgcgctatcgtccccataaaaatgccgatactcgtggtggcaaacagactgagcgccacgcccagcataaacagcgggatgctgccttcaatcggtacgcccagtacacctttcaccatcagcaccaggcttaatccgcttaccaccagcaccaccagccccatgctccagatcttcgccatcatgatctcaaacggcgttatcggcatcaccagtaagtgttccaccgtgccgtgttcacgctcgcggatcagcgcgcttccggtcaatacaatcgccagcatggtaatgttgttgatgatcgccatcaccccgccaaaccacgcgggatcgaggttcgggttaaagcgcatccgggtttccaggcttaccaacggttcgctgttatcacggtagcgcgcgacaaagctgttcacttcaccgttgataatattctggatatacccattgccggtaaatgcctggctcatgcgcgtggcatcgacgttcacctgaatatccggctggcgtccggcgaggacatcacgctgaaaattaggcggaatatttatcgcgaaggtatagcgtccggcgtccagtccggcatccatctcatcggcggtgatcatctccggtggcaaaaaccacggacgatagaagctgttaacgatccggttgcttaactggctttgatccatatcggcaatggcgatcggcgcgaggttcaagcttcctggcgtaacggtcgcactgctatacacgctcaccgtaaagctgaagacaatcagcgtcagcatcgctttatcaccgagcagactgcgcaactctttgatacccagattaaaaatattgcgtaaatggcgcatcatccctcctgttttttcagcagcaggatacttaagcccatcaccagcgggatggctatcagtaacgggataaaaagttgccacaaatcagtcagatccagcgctttgctgaacgtcccgcgggcgatagtcagaaaatgactggtcgggtaaacctcgccgatccaacgtccaggcccttccaggctagctaccggatcgatcatcccggaaaactgtgtcgccgggatcaacgtgataatcgccgttccgaaaatggcggcaatctggcttttcataaaggtggagatcagcagccccattccggtggcaatgatgatatacagcagcgccgccagggtgagcgtcaggaaactgcctttatgcggtacgccaaacacaaacacgctcaggccgcagagcaggaaaaagttcagcatccccagcgcgatgtatggcaactgtttaccaagcaaaaattcactacgcgtggtgggggtcacgtaaaggttgataatgctcccaagctctttttcccgcaccacgctaagggcgcttagcatactcgggatcatcatcagcagaagcgggatcaccgccggaacaatcgctggcaggctttttacgtccgggttatagcgatagcgcgtctcaatattcatcagcccgctttggctggcgggtgtgctttgtcggctcgccacatcctgtaaccagctctggtgcatggcctgcacgtaaccttttaccgtttcagcacggctcggcatcgctccgtcgatccagacgccgagttccacaggcgtaccacgcgcgatatcgcgcccgaaattgggcgggatctcaatcgccaccgtgatatcgcccgcacgcatccgacgatcaagctcgtcataactggtgagcggcggctgttcgataaagtaacgggaaccggagaggttgagtgtccacgcctggctactgacggtctggtcgcggtcgagcaccgcaaagcgcaggttttccacatccatactgatgccgtaacccattatcagcatcaggatcaccgttcccatcagcgccagcgtgctacgtactggatcgcgtcgcagttccagcgcttcgcggcggctgtagctaaacagacggcgcaggctaaatccctgacgcggcgcgtgggtggtgtcgtgtaccacgggcggcgcttcggcttcgttgctctgccctgccgcttcctgcaaataggcgataaatgcctcttccagactggcggctccgcgtttctcaaccagttcctgcggtgtaccgctggcaagcacttttccggcgtgcatcagactgatgcggtcgcaacgttccgcttcgttcataaagtgggtggagatgaagatagtcactttgtcctggcggctgagatcgaccatcaactgccagaacatatccctcgccaccggatcgacaccagaagtaggctcatcgaggattaacatctccgggcgatgaatcaccgccaccgccaggctaagccgctggcgaatgccgagcggcaaactctccggcagaatatcttcaacgtcgttgagcttaaaacgctcgctcatttcagccactcttgcgggaatttccgcttccgggatgtgaaacaaacgggcatgtaactcaaggttttgccgcacggtgagttcgttatagaggctaaacgcctggctcatatagcccacccgacggcgggtatcgatatcttttggatcaaccggttgcccgaacagccacgcctcaccttcgctggcgggcagcagtccggtgagcattttcatggtggtggatttaccgcagccgttgctaccaagaaaaccaaaaatctccccgcgtggaatgcggaaattaacgtgatcaacggcaacgaaggaaccaaaacgcatggtcagatcgcgcgcttcgatggcaatctctgcgttttcaggttgatacggtgggatcactaccgcctgatgcgcctggcgttgcgcttgcggtaacagatttataaatgcttcttccagcgtagcgctttgcgtttgctgccgtagctcttcggcgctgccagttgccagcacttctccggcattcatcgctaccagccagtcgaagcgttcggcctcttccatataggcggtggcgaccagcacgctcatattgctctgccgctggcgaatactgtcgatcagatcccagaactgggagcgggagagcgggtcaacccccgttgttggctcatcaaggatcaacagttccgggtcgtggattaacgcgcagcacagcccaagtttttgcttcatcccgccggagagtttccctgccggacgatcgcgaaacggtgctaacccggtgctggtcagcagctcattgattcgcacttcccgctccgctttgtcgtgaccgaacaggcgagcgaaaaaatcgacgttttcatacacgctcaaggtgtggtagaggtttttgcccagcccctgcggcatccaggcgatgcgcgggcagacgtcgcggcgatgcttcgggtcgcgcatatcgccgcccagcaccatcacattgccctgttcaatgacgcgggcaccggaaatcaagctcaacaagctgctcttcccgacgccgtccgggccaatcagcccgaccatacagcgggccggaatatcgagagtgatattgttcagcgcaacggtttttccataatgctggctcacgcccgccagttgcgcgacaggcgggacgggaaccagttccagatgcgtcattgcggcaacctcaccacgaggtcgtcaggccacggaagttcttcattcacccgcacccacgctacgcccggcaaaccggttttgacatattccagatgctgctggagtaattccggtgggatacgcgctttgacgcggaacatcagtttcagccgttcatcgctggtttcgacggtttttggcgtgaactgggcgacactggcgacaaaactgatggttgcaggaatacgcagatctggcgcggcatcgaggatcagccgggcttcaccgcccagtttcagcgtgcccgcctgttcggttggcaggaagaaagtcatatagacgtcgctgagatcgaccatattcagcacccgaccgcctgccgccagcacttcgcctggctcggcaacccgatactgcacgcgtccgtcacgcggggctttcagttcgctgtcatcgatatctgcggcaatgcgccgttcagtggcttgtgccgcttcgacgcgggtttgcgcctgaatgatattggtgcgtgccgcttctatagccgctttagaagcgcttacctgagctttcgcgctttccagcgcagctcgggcgctctcagcggcggcgcgatcgtcatccagctgttgcgcagaaatagcccctcgttgggccagactacgggaacgcgtatgacgttttgctacggagtccagttctgcctggcgttgattaaccaggctctgtgcggcacgagtttcgctttgtcgttgctccagcaaagcctgcgcggcagcaacggcgctttgtgcctctttgatttgcgcgatggcttccagtcgctgttcctgcaacacgcgagtatccatcttcgccagcacttcaccttcgcgaacaaacttgccttctttcaccagaatggtgtcgatacgcccggcaattttgctggcaatatccacttccgtcgcttcaatgcgcccattactgacagcaaagccttccggcacacctgccgggcgcaacagccaccacgccacgatagccgccaccgccagtaacccgacaacccaccacgccagatggcgcttactcttatccataatcgacccgccataatccctgtaagcaaacgacgcgtgttacaactgccgccgaacgacgttcagcggattcttccatccgggataagaaggaaacggcaaatacgaccagcgcgcagagcattgagcgccaacggggaaggcttagtgaaaacgggtagtaatgttgtcatcatcagcattcctggccgtaaatgaaacacgcatactcataagtgtgatctataaaactggctgacaaaacggtatccatcctgttggatagcgtttcacgcctgttcagttgcaggaacagagcattcctttttacgttttatcaacagtctcaaccagatagtaacattaatattcatgttgtctatggttcagagctgtaacattgtgcgccttctaatcaaaggcataagtccatttctgtttttttcatgctggtaagacttccagggagtggttatctcaggccctgcaccagggttaatttggcaattatgcatgctgaacattcttccagcatgtttactgtcacgggcgttaagacctaaaactgtccccgtttcgcctatgcgttctcttccaccatttccgttatgtgcaacaacttgatttatacctaacatttgactacatgctaatagtgcttcaagtttaggtctgtaatctgtgctaacagaaaaataacgattaaaggatcgacaagagatagcccggctagttttaaactttttgccattaattatagcatgatgctttttattgataattgccgctaattcgaccggatcgagagcattggtcatttcatcaatagagactgttatcggtcctataatgtaacgttttcgctgatcatcaaaagttatcccatgatgatttgccattattttgtatttggggtcatagaaacatacaggataatcttttatcccagagtaggtatcctcatcgagtggtttcatacgcgtgaagttctgcatatagttaccattgcaattcgtttcatgatttccagctaatacatgaacattttcattgatactcattatgcgttttaacaaatcgatgataaattgatcaccacagatattgctaaatcgatcgccggtttggtcgcccagaaacgtacatggcgtcacagcgtctttattaataactaaataaggctgaagactttctaaaataatgtctcttctgttcaggatactgattattgtattaacattagtgttaagttgctcattaaagttctcccttagcaatacgttgagaacttcatcttctatattaagcaactggctaaggaaattttctccttcagccatgattcccaaatgtcccgttgcgaaaagcgcgaacaaaactgcaccgacactgccatcggtatcaccaaaataggttggtctggtacttgtgggatcaacgggtaaacaattggagaaatagattctgtcagcgaactggggttttatcattgtttcgaatttaatatcagatacattatattggcttattttccagttccagatgggtttgtagctctcagtaactgcaacatcattagcattatcatttactgtcatattattaagtaaataaacaatactgcaccaattaatatcggtattatcaagagagcaaccgtaatttttgctattaattgtcacaataaactgataattattattcctacgtagaatatgagcacgcatgccgcttagcatactatatttttcactatgatccgtttgtatggtaaaactaattttgtcatcttgaatagattgttggaaccgttctatttgccaatcatctattttttccacaacctcaccgagcattgtcctggcaatactacttatatcatcacctataccatttgcaatatacccaaacagttctttagtgaagttggtaacatgctcttgcaccatatcatttgttgcgattgtcgttgtactgtcgttagtgcctgccacagttccaattttcatattttacctcatattatttaccgcgaggaatacatagttaacattttatcttatgacatacacctcatgttcgatgggaaaataattatattttgcacaaatcattcagcctcaaagcataatatgaaatttcttatctcatagcagagaaagtccctaaagattgtagaggcgtcatcagaacatgcctctacaatcgattaagaaaacctatgaaatactggcaggattaaaaagacataccaccgtattcatggagttttaatgtagttgaaaacaactaagcccactggaataaattattttattatttttatcacgtgcttccttcagggaatttagccccataataccattatcaaattgttgattatgatctaccccgggcccatgatgcccatatttttgtctaatgtatttgctggggtcttcacctttgagtgtctccccacatatgaagatacgttcacgtgctggtctgaaatcagtagtgttatcaaaataattagcatatacaggtgtgggtttcaaagtattgcttcggattagatggaatagaggatcatccatgtgttctttatgttttttattaaaaatattggctaattcctcaggatcagtaggatttttcatctgattaaatggaacctgcaaagcacgctgacaataacatttttttcttcatctcttattattccgtgatgactggttaaaacttgcctttcactgtcataattacaaacatcgagcgttttaattaagttatacgtatcaccggcagagagtttatgatttgctagtcgtgcagtatagttaccattaaaattgatttcatgatttccagccagaacgacgacatttttattaatacggctatctttattaccctccatatttcgcatagaatttagcaaagtaaggatatatttatcaccaaaaatagtactaaatctatcgcctgtatgatccccaaggaagatacaaggggttatcgcatcgtcctttaaaaaaacatgttgatgcaactcattcaagatcatgtctctcgtatttaataaatcgtagagcactttattatttttatgtttgtatgcagaactagccatctcttcgtgttttaataattcacataataaactccaacccttttccctgatgcctatatgcccactaacgagcaatgcataaagtacagcgcctactcttccatctgtatcgccaaaataagccgtgttggcattttgtgggttaatcacaccacactgtttatagaagtctattttactaaacacagatttaacatagctatcaaacttttccttagtaaacgtctctttagagacatcccaacgccagtcaggtttgaaattaccactaagaagagtaaagaaatttctcgctatgatagaaagcccatcaactttataaattatatcacttttatctccagaggaattaataaaataataaccgcccttacactcaacagtaacggtaatgggagagcttaattttaacacatggttattgtctggtataattgtaaagataaacgtatcagtagtattgtcggcgaatctattatattcttgaatatctatagaaggttcactattataaaaccatactttctccatctggtgactacgatcatttaccttccagtgaccatgttgcaggaaatagatgatatgcaggccaaaatcgttatctatttggctatcattatccagtttatcaaattcaactatctttgcacgatgtgttttatcaaccttgccatggtgttgatgactgttaactttatcactatgcttatcttgatggctactagagatgtttctaatctgattgtcaattgctttcataaataacctgtgatatttttgaattgtttgtaacaaaataaatgatacttgtctgaaaaacagatttacgacgatataaaataataatacttatatgttcgctgattttaagcaccgagactatccggtcttttaccaaataatgaagaataatccctccctggaagataattgtaaaaaacaacagcataagaattaatcttaggataaatttttatttatcatggccttttgaacgctgaaaagtagcgctctgcaaagtaaaccccgctatagttatgctatgcatttgtctttaatgatatctcgtcattatattaacaggatgaaattatcattaatgcatatttcaatattagcagggatacctgaggagtttaaagtgaacatatatatcgggtggcttttcaaattaatccctttgattatgggcttaatttgtatcgcgttaggtggctttgtgctggaaagtagtgggcaaagcgagtatttcgtcgcgggtcatgtgctgatttctctggcggccatatgcctggcattattcactaccgcatttattatcattagccagctcacgcgcggcgttaatacgttttacaatacattgttccccattattggctatgcggggagtattatcaccatgatatggggttgggcactgttagcaggcaatgatgtgatggcagacgagtttgtcgccggccatgttattttcggcgttggtatgattgccgcctgtgtaagcacggtggcagcgagttccggtcactttctgctcattcccaaaaatgcagcggggagcaagagcgacggaacaccggtacaggcttattctagtttaatcggtaactgcctcattgccgttcccgttttactcaccctgctcggtttcatttggtctattacgctgttacgtagtgctgacataactccgcattatgtcgcgggtcacgtattgcttgggttaaccgcaatctgtgcctgtctaattggccttgttgccacaattgtccatcaaacacgtaatacgtttagtactaaagaacactggctgtggtgttattgggttatttttctcggcagtatcacggtactgcaggggatatacgtcttagtcagttccgatgcaagcgcccgactggctcccggcattattcttatttgcctcggaatgatctgttacagcatattcagtaaagtctggctactggcactggtatggagacgtacctgtagcttagccaacagaataccgatgattcccgtcttcacctgcctgttttgccttttcctggcaagctttcttgcggaaatggcgcagaccgacatgggatattttattcctagccgagttctggtcggtttgggagcggtatgctttacgttgttcagtatcgttagtatattagaagcgggttctgctaaaaaataattgcaacgtaccggataaaaccagcgttgaccatttgcgtaacgctggtttttcttaggcatcatgaaataacgcagcattaatgcatagtggttaagtataaaaaacagcaaagttactgtttttttcaacctgttcatatttcataaagatctggccactgagtgagttttcaatcacctttccatccaccttatattaagcatggagggtttcagttcacgggctcattagaaaataatcacaagataaccactatcaaaattagctcatttttaatgcgactctaataattttcatctttaggaaataggtcaggagctctttgctgcaatcaaatcctgcgcacaagcccacgcactgctccacgcccactggaagttatagccccccagccagccggtgacgtccatcacttcgccgatgaagtacagcccaggcactttgcgcgcttccatcgtccgactagagagttcgttggtgtccacgccgccgagcgtcacttcggcagtgcgatagccttcagtgccgttgggttgtacgcgccagtcggtcaatgtgctaatcagtgcctgttggtcacgcacgttgagctgttttaggctaacatccgggatttgcccgagttgctgtaagcgttcaaccaaccgcttcggtagatgaaccgccagtgtgtttttcaggctttgattcggatgtgcgttacgctgctcattcaggaaggtttcgaggtccacatccggtagcagattgatgctgacaaattcccccggttgccagtagctactaatctgcaacaccgccggtccagacaagccgcggtgggtgaagagtaagttctcacggaaaacggtgccgttttcagcggtaatcacggaaggcaccgccacgcccgccagcacctgtaactcttcgagcaacggtttatgcagagtgaatggcaccagacccgcgcgggtcggcagcacgttgaggccaaattgttcggcaatcttataaccaaacgggctcgcgcccagccccggcatactcagcccaccagtcgcgatgaccagcttttcgcaaccgacagtcatgccgttcagatcaagcgtgaagcctgtttcatccttcgccacactcagcacttcgctacgcaatctgaaggtcacattgcccttctcgcactcatccaccagcatgtcgacaatctgctgcgcggagtcatcgcagaagagttgccctaacgttttctcgtgccaggcgatgccgtgtttattgaccagatcaatgaaatcccactgggtaaaacgtgcgagtgcagacttacaaaaatgcggattctggctcagataagcgcctggttcgacataaaggttggtaaagttgcagcgcccaccgccagacataaggattttgcgccctggttttttaccattatcgatcagcagaacccggcgtcctgcctgacctgccagcgcagaacagaacatacccgccgcaccagcgcctataataatggcatcaaacctttccacgttgcgctcctcttagaaaaaacgggcgtgaattgtaaagattcctcagtggtcgcaccagcatcaatattactaaaaggaagtatttgcctgaattatataagataattattttttgagtgaaatccatacagggggcaaatcaaaaaaagtctatatttcactttgcccgcgccgcgaaagtcactgataatgcgccgcgttcatgtcctcaaaatggcgtaacgtcctatgctacatttgtttgctggcctggatttgcataccgggctgttattattgcttgcactggcttttgtgctgttctacgaagccatcaatggtttccatgacacagccaacgccgtggcaaccgttatctatacccgcgcgatgcgttctcagctcgccgtggttatggcggcggtattcaactttttgggtgttttgctgggtggtctgagtgttgcctatgccattgtgcatatgctgccgacggatctgctgcttaatatgggaagctctcatggccttgccatggtgttctctatgttgctggcggcgattatctggaacctgggtacctggtactttggtttacctgcatccagctctcatacgctgattggcgcgatcatcgggattggtttaaccaatgcgttgatgaccgggacgagtgtggtggatgcactcaatatcccgaaagtattaagtattttcggttctctgatcgtttcccctattgtcggcctggtgtttgctggcggtctgattttcttgctgcgtcgctactggagcggcaccaagaaacgcgcccgtatccacctgaccccagcggagcgtgaaaagaaagacggcaagaaaaagccgccgttctggacgcgtattgcgctgatcctttccgctatcggcgtggcgtttagccacggcgcgaacgatggtcagaaaggcattggtctggttatgttggtattgattggcgtcgcgccagcaggcttcgtggtgaacatgaatgccactggctacgaaatcacccgtacccgtgatgccatcaacaacgtcgaagcttactttgagcagcatcctgcgctgctcaaacaggctaccggtgctgatcagttagtaccggctccggaagctggcgcaacgcaacctgcggagttccactgccatccgagcaataccattaacgcgctcaaccgcctgaaaggtatgttgaccaccgatgtggaaagctacgacaagctgagccttgatcaacgtagccagatgcgccgcattatgctgtgcgtttctgacactatcgacaaagtggtgaagatgcctggcgtgagtgctgacgatcagcgcctgttgaagaaactgaagtccgacatgcttagcaccatcgagtatgcaccggtgtggatcatcatggcggtcgcgctggcgttaggtatcggtacgatgattggctggcgccgtgtggcaacgactatcggtgagaaaatcggtaagaaaggcatgacctacgctcaggggatgtctgcccagatgacggcggcagtgtctatcggcctggcgagttataccgggatgccggtttccactactcacgtactctcctcttctgtcgcggggacgatggtggtagatggtggcggcttacagcgtaaaaccgtgaccagcattctgatggcctgggtgtttacccttccggctgcggtactgctttccggcgggctgtactggctctccttgcagttcctgtaatcgtacgcaccaaaacgagcgggtcagctggcccgcttcagattgtgacatagtgcgctttgttcatgccggatgcggcgtgaacgccttatccggcctacaaaaacatgcaaattcaatagattgcagagattatgtaggcctgataagcgtagcgcatcaggcaattttgcgtttgtaatcagtctcgagcgggtcagtttactggcccgctttttttatgcgttattattgctgaagtgcttaatgccaaatcatcaatgcaatcaggctgaccaccaccagaccacacaatgcgctggtcagaataaactgccgacgcacccgctcacagcggcgaataaattcatcatcgtgatgatcgcgataacgttgggcatagatataccaaacgagacgcacctgtttgttgggttggccatgattggtaaaaaagccccctccatcaacatattgatagagcaatggatcgcagttacgcagtaccactaacaacgcgcgtagactactgaaatagcgcgccatgttaacaatgcaaacgacacataaagcccaaaataatgcgacggtgcttatcatacctcctccccggcgacctgcccgcggagttccaccccggggctaccgctcccgatacgctgccaatcagttaacaccaggtcctggagaaaccgcttttgtggtgaccaacatacgagcggctctatagatagtgtaggagatcaggttgttttttttccagaaggttaaccactatcaatatattcatgtcgaaaatttgtttatctaacgagtaagcaaggcggattgacggatcatccgggtcgctgtaaggtaaggatggtcttaacactgaatctttacggctgggttagccccgcgcacgtagttcgcaggacgcgggtgacgtaacggcacaagaaacgctagctggccagtcatcgacaactttatggaaggagtaacactatggcttataaacacattctcatcgcggtcgacctctccccggaaagcaaagttctggtagagaaagcagtctctatggctcgcccctacaatgcgaaagtttctctgatccacgtagatgtaaactactctgacctatacaccgggcttattgatgtgaatctgggtgatatgcagaaacgcatctctgaagagacacatcatgcactgaccgagctttccactaatgcaggctacccaatcactgaaaccctgagcggcagcggcgacctgggccaggttctggtcgatgcaatcaagaaatacgatatggatttggtggtttgtggtcaccaccaggacttctggagcaaactgatgtcttccgcacgtcagctgatcaacaccgttcacgttgatatgctgattgttccgctgcgcgacgaagaagaataatcttccctctacgacgtgttcctgaacgcccgcatatgcgggcgttttgctttttggcgcgccttgttacctgatcagcgtaaacaccttatctggcctacggtctgcgtacgcaatcaaaatccccagccaatacaacatttaacaccatcatattttccatcattagtgtgatcatctggttattttctgttgtaatagtgtattaatctattcaccgcatcaatattaagaatctctgacagatgtaaactttttcgcgcgttatcccttacgcgttcatacttttcaggatggtattggaaggttaataaatatgaatacaacaacacccatggggatgctgcagcaacctcgcccatttttcatgatcttttttgtcgagttatgggagcgattcggctactacggcgtgcagggcgtactggcggttttcttcgttaaacagcttggattcagccaagagcaggcttttgtcacttttggtgcttttgctgcgctggtctatggcctcatttccattggcggctatgtcggcgaccacctgctggggaccaaacgcaccattgttcttggagcacttgtgctggcgattggctacttcatgaccggcatgagcctacttaagcctgacctgattttcatcgccctggggactatcgctgtcggtaacggcctgtttaaagctaacccagccagcttgcttagcaagtgctatccgccgaaagatccgcggcttgatggcgcattcaccctgttctatatgagcatcaacatcggcagcttgatagcgttaagcctggcccctgtgatcgctgatagattcggttatagtgtcacctacaacctgtgcggggcggggttaattatcgcattactggtttacatcgcctgtcgtggaatggtgaaagacattggttctgaacccgacttccggccaatgagcttcagcaaactgttgtacgtgttacttggcagcgtggtgatgatcttcgtatgcgcatggctgatgcacaacgtagaagtcgccaatctggtgctgattgttctctccatcgtcgtcaccatcatcttctttcgtcaggcattcaagctggataaaaccgggcgcaataaaatgtttgtcgcctttgtcctgatgctcgaagcggtggtgttttacattctctacgcccagatgccaacaagcctgaacttctttgccatcaacaacgtgcatcatgaaattctcggtttttccatcaacccggtcagcttccaggcgcttaacccgttctgggtggtactcgccagcccaatactggcaggcatttacacgcatctgggtaacaaaggcaaagacctcagcatgccgatgaaatttactctcggcatgtttatgtgcagtctgggctttttgacggcggcagctgcgggaatgtggtttgcggatgcacaagggctgacaagcccatggtttatcgtgctggtgtacttattccagagcttaggtgaactgtttattagcgcccttggcctggcgatgattgctgccctggtgccgcagcatttgatgggctttattctcgggatgtggttcctgacgcaggctgccgcgttcttgctgggcggctatgtggcaacatttaccgcggtgccggacaacattaccgatccgcttgagacgttgcccgtctataccaacgtgtttggtaagattggtctggtcacgctgggcgttgcagtagtgatgctgttgatggtgccgtggctgaaacgcatgattgcgacgccggaaagccattaattattcttgcagaaagcagggtagcgttatcgctaccctgttttagttttacactggcgtacctgcatagatatcaaagcgatgccctttagtgactaccgcgtttggcgtggcgacattcgccagcggtggcgcgtagtccgggcgctttaccaccacgcgtttggtcgccagcaagcgtgcaggctccagtaatccatcggcatcaagatccggtcccaccaggctctgaaagacacgcatctcttttttcactagcgcgcttttctgcttatgcgggaacatcgggtcgagataaaccacctgcgggcgcggggtaatatcagtcagcgccgtcaggctggaggcgtgaattaactgcaaccgctcctgcaaccagccgccgatttccgcatccgcataaccacgcgccaggccgtcgtcgagtagcgcggcaaccactggattacgctccagcatccgcacgcggcagccgacactagccagtacaaaggcatcgcgcccaagtcctgcagtggcatccaccacatccggcaaataatcgcctttaatgcccaccgctttcgccaccgcctcaccgcgaccaccgccgaatttgcgtcggtgcgccatcgctccgccaacaaaatcaacaaagatgccgccaagttttggctcatcacgcttgcgcaattccagatgttccggcgttaacaccagcgccatcaggttgtcttcatcgtgctccagcccccagcgggccgccagaacagataaggcaccgtctccggtgcctgtttcatcaattaagcagattttcactgaatgatcagcccttaatgccgtaatgctccagcatcgcatccagctgcggttcacgaccacggaagcgtttgaacagatccatcggctcttcactaccgccacggctcagaatgttgtcgaggaagctctgcccggtttcacggttgaaaatgccctcttcctcaaagcggctgaaagcatctgccgccagtacgtcagcccacaggtagctgtagtaacctgcggcataaccaccggcgaaaatatggctgaaagcgtgcgggaaacggccccaggacggagatggcaccacggcaaccagtttcttgatttctgccagagtttcgaggatttttgccccctgatccgggcggaactcggcatgaaggcggaaatcaaacaggccgaactccagctgacgcagaataaacagcgccgcctggtagttcttcgccgccagcattttatccagcaactctttcggcagcggttcgccggtttcatagtgaccagagataaacgccagcgcctccggctcccagcaccagttttccataaactgactcggcagttcgaccgcatcccacggcacaccgctgataccggaaacaccagcggtttcgatgcgggtcagcatatggtgcaggccgtgaccgaactcgtggaagagggtgatcacttcgtcgtgagtgaacagcgccggtttaccatttaccgggcggttgaagttacaagtcaaatacgcgaccggtttttgcaaagaaccatcagctttacgcatctggcctacgcagtcatccatccacgccccgccgcgcttgttttcacgggcatacagatcgaggtagaagctaccgcgcagttcgttattttcgtcatacagttcgaagaaacgtacatccggatgccagacatcaacatctttacgctctttagcggtgatgccgtaaatacgcttaaccacttcaaacaggccgttaaccgctttgttttccgggaagtacggacgcagctgttcgtcactgatgctgtagaggtgctgtttttgtttttcgctgtagtaagcgatatcccacggctgcaactcatcgacgccaaattcggctttggcaaaggcacgcaattgcgccagctctttttcgccttgtggacgcgcgcgttttgccagatcggttaagaaatccagcacctgctgcgggttttctgccattttagtggcaagggatttaaaggcgtagttttcaaagcccagcagttgcgccagttcgtgacgcagcgcgaggatctcttccatcaccttgctgttatcccatttaccggcgtttgggccttgatcggaggcgcgggtgctgtaagcgcgatacatctcttcacgcagagcctggttgtcgcagtaggtcattaccggcaagtagcttgggatatccagcgtcagcaaataaccttccagctctttcgcttcggcctgggcttttgccgcagccagcgcgctttctggcatccccgccagctccgcttcgtcggtaacgagtttggtccagcccattgtcgcatcgaggacgttgttgctgtactggttgcccagttcagaaagacgggtcgcaatttcgccgtaacgctgctgtttctctttcggcagacctatgccagagagttcaaagtcgcgcagtgcgttatcaaccgctttcttctgcgccgtgttcagcgtggcgtaatgatcgccatcgcgcaggtcgcgatacgctttatacagcccttcatgttgccctacccaggtgctgtattcgctcagcagcggcagggtttgttcgtaggcttcacgcagttccgggctatttttcacgctgttcaggtggctgaccggggagaagatacgccccaacacatcgtccacttccgccagcggctggcagagattttcccaggtgtacggtgccccttgcgctactacgcgctccacgttttcgcggcagtcgttcaatgccttagtcacggctggaacgacatgttccgggagaattttagaaaacggaggcaattcaaagggagtcagtaacggattcgtcattcgcgcagtcctggttaaagaggttaaggaagcgctcaacaggcgctttacataatgtgtgtagcatggggttaagtgtagtgaatttcaatgagaaacgttacgctttcgcggcggcggcctcttttcggtatactgtcctgatacgcttttgtgcgccccgaatacgggccgatttttacttaccggaacacctttacccatgctcagttatcgccacagctttcacgctggcaaccacgccgacgtccttaaacataccgttcagagcctgatcatcgagagcctgaaagagaaagataaaccgtttctctatctcgacacccacgcaggggccgggcgttatcagttaggcagcgaacatgccgagcgtaccggcgaatatctcgaaggcatcgcccgtatctggcagcaggacgatttgcccgcagaactggaggcgtacatcaatgtggtaaaacacttcaaccgtagcggtcagttgcgttactaccccggtagcccgttgattgctcgcctgctactgcgtgaacaggacagcctgcaactgaccgaactgcacccgagcgattacccgttgttgcgttctgaatttcagaaagatagccgtgcgcgtgtcgaaaaagccgacggtttccagcagcttaaggccaaactgccgccggtttcccgccgtggtttaatccttatcgacccgccgtatgaaatgaaaactgactatcaagcggtggtcagcgggatagcagaaggttacaaacgtttcgccactggtatttacgcactgtggtatccggtggtgctgcgtcagcaaattaagcgcatgatccacgatctggaagcgaccggtattcgcaaaattctgcaaattgaactggcggtactgccagacagcgatcgccgtggcatgaccgcttccggcatgattgtgattaacccgccgtggaaactggaacaacagatgaataacgtgctgccgtggctgcacagcaaactggttccggcaggcaccgggcacgccaccgtaagctggatcgtgccggagtaattgcagccattgctggcacctattacgtctcgcgctacaatcgcggtaatcaacgataaggacactttgtcatgactaaacactatgattacatcgccatcggcggcggcagcggcggtatcgcctccatcaaccgcgcggctatgtacggccagaaatgtgcgctgattgaagccaaagagctgggcggcacctgcgtaaatgttggctgtgtgccgaaaaaagtgatgtggcacgcggcgcaaatccgtgaagcgatccatatgtacggcccggattatggttttgataccactatcaataaattcaactgggaaacgttgatcgccagccgtaccgcctatatcgaccgtattcatacttcctatgaaaacgtgctcggtaaaaataacgttgatgtaatcaaaggctttgcccgcttcgttgatgccaaaacgctggaggtaaacggcgaaaccatcacggccgatcatattctgatcgccacaggcggtcgtccgagccacccggatattccgggcgtggaatacggtattgattctgatggcttcttcgcccttcctgctttgccagagcgcgtggcggttgttggcgcgggttacatcgccgttgagctggcgggcgtgattaacggcctcggcgcgaaaacgcatctgtttgtgcgtaaacatgcgccgctgcgcagcttcgacccgatgatttccgaaacgctggtcgaagtgatgaacgccgaaggcccgcagctgcacaccaacgccatcccgaaagcggtagtgaaaaataccgatggtagcctgacgctggagctggaagatggtcgcagtgaaacggtggattgcctgatttgggcgattggtcgcgagcctgccaatgacaacatcaacctggaagccgctggcgttaaaactaacgaaaaaggctatatcgtcgtcgataaatatcaaaacaccaatattgaaggtatttacgcggtgggcgataacacgggtgcagtggagctgacaccggtggcagttgcagcgggtcgccgtctctctgaacgcctgtttaataacaagccggatgagcatctggattacagcaacattccgaccgtggtcttcagccatccgccgattggtactgttggtttaacggaaccgcaggcgcgcgagcagtatggcgacgatcaggtgaaagtgtataaatcctctttcaccgcgatgtataccgccgtcaccactcaccgccagccgtgccgcatgaagctggtgtgcgttggaagcgaagagaagattgtcggtattcacggcattggctttggtatggacgaaatgttgcagggcttcgcggtggcgctgaagatgggggcaaccaaaaaagacttcgacaataccgtcgccattcacccaacggcggcagaagagttcgtgacaatgcgttaaatgttaaagggctaagagtagtgtgctcttagcccttaattacgtttccgctatcagttcagaagctgaagcagaaagcggatcagttccagcagcgcaattaacgcccctagaacgatgattgctttatcaatcacccgttttctccatgcgatggagtgagaatgcatccgcttactcatccactgcctgtcacggcgcatgtctcattgttagataagaactctctcactccggccagagcatcagttaacggcaccacccgtacttctgaccaggactttgaaagcgtttatgcgcattgccagagtgaaaatgcctcagagctaactggataatcatacagtacatgcaggttataaaaccagcacgtccttgcaatagtttcagtatggtattagcattgatgcgttagatgatggctatctcactccagtcagagccaccaactcagggctggaaagtaaaaaaccgacgcaaagtcggtttttttacatccggattcggacaaggcttaatatgacgatgacccagtgaaagtatataaatcgtcactgcgatatataccgaagtgctccctccgccagctgaagaaatcgctaattcttgcaatgttagccactggctaatagtattgagctgttagataagaactctctcactccagccagagccaccaactcagggctggaaagtaaaaaaccgacgcaaagtcggtttttttacgtcctgattcagacctcctttcaaatgaatagccaactcaaaattcacacctattaccttcctctgcacttacacattcgttaagtcatatatgtttttgacttatccgcttcgaagagagacactacctgcaacaatcaggagcgcaatatgagttttctgttacccatccaattgttcaaaattcttgctgatgaaacccgtctgggcatcgttttactgctcagcgaactgggagagttatgcgtctgcgatctctgcactgctctcgaccagagccagcccaagatctcccgccacctggcattgctgcgtgaaagcgggctattgctggaccgcaagcaaggtaagtgggttcattaccgcttaagtccgcatattccagcatgggcggcgaaaattattgatgaggcctggcgatgtgaacaggaaaaggttcaggcgattgtccgcaacctggctcgacaaaactgttccggggacagtaagaacatttgcagttaaaaatttagctaaacacatatgaattttcagatgtgttttatccgggaggcattatgttactggcaggcgctatctttgtcctgaccatcgtattggttatctggcagccgaaaggtttaggcatcggctggagtgcaacgctcggcgcagtactggcgttagttacgggcgtggtccatccgggtgatattccggtggtgtggaatatcgtctggaacgcgacggctgcgtttatcgccgtcattatcatcagcctgctgctggatgagtccggcttttttgaatgggcggcgctgcacgtcagtcgctggggtaatggtcgtggtcgcttgctgtttacctggattgtcctgctcggtgctgccgttgccgccctgtttgccaatgatggcgcggcgcttattttgacaccgattgtcatcgccatgctgctggctttagggttcagtaaaggcactacgctggcgttcgtgatggcggccggattcattgccgataccgccagcctgccgcttattgtctccaacctggtgaatatcgtttccgctgatttctttggcctcggctttcgcgaatacgccagcgtgatggtgccggtggatatcgccgcgattgttgccacgctggtgatgttacatctctattttcgcaaagatattccgcagaactacgatatggcgctgctgaaatctcccgcagaagcgatcaaagatcctgctacgttcaaaactggctgggttgttttactgcttctgctggtgggatttttcgtcctggaaccgctcggcattccggtgagcgccattgcagctgtgggcgcgctgatattatttgtcgtcgctaaacgcggtcatgcgattaatacgggtaaagtcctgcgcggtgccccctggcagattgtcatcttcagcctcggcatgtatctggtggtttatggcctgcgcaatgccggattaacggaatatctttctggcgtactcaacgtgctggcggataacggcctgtgggccgcgacgctcggcaccggattcctcaccgccttcctctcttctattatgaacaatatgccgacggtactggttggcgcgttgtccattgatggcagcacggcatctggcgttatcaaagaagcgatggtttatgccaatgtgattggctgcgatttgggaccgaaaattaccccaattggtagcctggctacgctactctggctgcacgtacttagccagaagaatatgactatcagctggggatattacttccgtacagggattatcatgaccctgcctgtgctgtttgtgacgctggctgcgctggcgctacgtctctctttcactttgtaatgagatactgatatgagcaacattaccatttatcacaacccggcctgcggcacgagccgtaatacgctggagatgatccgcaacagcggcacagaaccgactattatccattatctggaaactccgccaacgcgcgatgaactggtcaaactcattgccgatatggggatttccgtacgcgcgctgctgcgtaaaaacgtcgaaccgtatgaggagctgggccttgcggaagataaatttactgacgatcggttaatcgactttatgcttcagcacccgattctgattaatcgcccgattgtggtgacgccgctgggaactcgcctgtgccgccctagtgaagtggtgctggaaattctgccagatgcgcaaaaaggcgcattctccaaggaagatggcgagaaagtggttgatgaagcgggtaagcgcctgaaataaagcggcgatatcccccccacaggttgttagaaaagtgcgctttatttatgtcggatgcgacgctggcgcgtcttatccgacctacaaagttatgaaaattcgatgaatagtatgttatttgtaggcctgacaggcgtagcgcatcaggcgattttgctatttacacagtactccctgcgtgagattccaattatcgcgtccagcatggtgtatcagtgagctgcttagttatcagcgatacagcgcagtagtttaaagacgtactggattatgatttatcagtggtttacacaacaaattattaaataattataagataccttaacccattttattattacacatctaaaacatcacaaaaaaaaatcacttcacacactatcagagaacataataactttttaaaatgagcgcattttgatagttgttaacgatttcctttacgatactatcactaccctttttttacacacaaatattaccgggtggagataaaagggaaatcaaaggtaattatatcaggaagatataacgcattacatttattgtgtgtagaagaaaatccattcctgttctaattatccaatttaaacatcttagcataaaacaaatgatgaataaggaattttatattgattattagcactttataatcattgaataaaaatagattttatgtacttttaaaacaatgcactatattatggggtgatggatattcatgtcacgccccaaaattaactgagttcacctaaacagaaaggatataaacatcagacaggtttacgttactatcaggcatatcacctcagaatcagatgaaaactataaagaaatatctattatggttttaatatttgttgataaggatagtaacatgaacatgacaaaaggtgcactcatcctcagccttagttttttgcttgccgcatgtagtagtattccgcaaaatatcaaaggcaataaccaacctgatattcaaaaaagttttgttgctgttcataaccagccggggttatatgttggtcaacaagcgcgctttggtgggaaggttatcaacgttatcaatggcaaaacggatacgttgttagaaatctctgtattaccgttggatagctatgcgaagcctgatattgaagccaactatcagggccgactgctcgccagacaaagcggcttccttgatccagtgaactatcgtaatcactttgttaccatcctcggcaccattcagggtgaacaacctggctttatcaataaagtcccgtataacttcctggaagtgaatatgcagggcatccaggtgtggcatttgagagaagtggttaataccacctataacctgtgggattacggctatggtgcattctggccggaaccgggctggggtgcgccttactacaccaatgcggtgagtcaggtaacacctgagctggtcaaataacaccaccgaaagatgcagatgctttctcagcatctgcatcatgcattacatcaaattaatacacagtaagctaactattattattataagccctgtcctgttaattacctttggcaaactgattataaagttaatgtccgcaccaggagtcggttatgtttcttataattaccagggatacgatgttcttcaccgcgatgaaaaacattctgagtaaaggtaatgtcgttcatatacagaacgaagaagagatcgacgtaatgttgcatcagaatgccttcgtcattattgatacattaatgaataatgtatttcattctaattttctcactcaaattgaacgattaaaacctgtccatgtcattattttctccccctttaatattaaacgctgcctggggaaagtgccggtgacctttgttccgcggactatcactatcattgattttgtcgcactcatcaatggcagttactgctctgtgcctgaagcggctgtgagtcttagccgcaagcaacatcaggttctgagctgcattgcgaatcaaatgacaacggaagatattctggagaaactgaaaataagcctaaaaacgttctactgccataaacacaatatcatgatgatcctcaatcttaagcggatcaatgagctggtacgccatcagcatattgattatctggtgtgaatttcaggcttacggtgagtctggctacgctgccacacagattagctaatactaacgcctttcacccctgccataccttttaataatcgcaacaggtcttctatgctcgttgtggcatgaagctggatatcaatggcgaccacttcatgatcttcattttcctgcaagctaactaaatcagtttttattttttgctgcttaaaccagtcgagcatacttaccgtattaccgttcactaatgtcagctgtaaatggtaatttttgttcatcaggcggaaggttaattgatggaagacttccagcaccaacaaggtcatcacactaccataaatacccagttcgtacataccgctgccaataaccatacctatggcggcggtcacccagatatccgctgccgtcgtcagacctacaatattttggttacgaacgagaatgttacctgcaccgataaacccgacgcccgtcaccacctgagcagcaatacggctggggtcgagtccgacgtgatctaaagacagcacgtcagcaaaaccatatttgctaacaatcataaacagggcgcttcccatgccaattaatacatgtgtgcgtaaccctgctcctttgccgcgcatttgcctttccatgccaatagcgccacaggcaattgccgcgagtataagacgtataataaattctgctgtcatataaaaatgcaaaaaggagcagcaagatggctcaacttgctactcttttttacttgcacctcattaattcggcaagtcattagatgcttgatttttgaaggtatacaaatttttctgcgggtttttcttacagtattcgatcactttaggaatttgagtgagatcggtttcatttaaagtaacggtatcgccacctttatatactgtttcttcatgcagcatccaccatgcaaccggggtcattgcttttggattcagatcaataaattcctggcaggtcatatctttagcggattcattggctgccaacgcagattgtgcgttcaccagactcaaagccgctacagcgcccataaaaataaacgctttacggagagaactaatattcattttgtaacccattcaatatagagattatatatgaacaggaggaatagctgcttttaaagaagatattccggcctgttcaatatgcaaggaagtacgatgtaacgcattcccggaattacatatctttcttaattttgtcccattcgcctttaactttatctttaaagttggcttgtttatcctgagtacaagcctgaacgatagctggggttacggttgcaataccctgaacatctaaaaccgcatcttctggtttatctttgttgttcagcgcttcagcaaaaccaactgcagttggctggaaggattcgtccacagccaggaaatcttcacaggtccaggagttgaccggttttttgttatcagctgctttttgcgcatccgctgcattgctcacaactggcagaagaagcagaccaccaagaataacgcctaatacttttttcatcgtaatatcctcaactataaagtgaaagagccgtcacgaatcaatttcgacactgaggttataacctggttttctgtatatgtcatgttgatggaaaatatcaaaatcagatatttttatttcaatacaatgagttacagatgcatcagatactgcaattaggaaatttttattaaatcgactgcattcttagacgcgtttttggcatagattgatagcaggggattttcttcttaattttatagggtggttctatgttatatatagataaggcaacaattttgaagtttgatctggagatgcttaaaaaacatcgcagagcaatccagtttattgccgtgctgctgtttatcgtcgggttgctgtgtatcagtttcccgttcgtctctggcgatattttaagcacagtagtgggtgcattattaatctgcagcggtattgcgcttattgtcgggttattcagcaaccgcagtcataatttctggccggtattatccggtttcctcgtcgcagtcgcctatttattgatcggctatttcttcatccgcgcaccggagctgggcatttttgccattgcggcatttattgccggtttgttctgtgttgcaggggttattcgcctgatgagttggtatcgtcagcgtagtatgaaaggcagctggctacagctcgttattggtgtgctggatatcgtcattgcctggatattccttggtgcaacgccgatggtgtctgtaacgctggtttccacactggtgggaattgaactgatatttagcgccgccagcctgttcagcttcgccagtttgttcgttaagcagcaataattaccccggttgtcacccggatcatagtcacttgatgtgactatgatccgattaatactctctccgctacgcagtgttgtagatcaattgcgcactatcattgaaataattacctgctagtgattatttcaacctactgaatttcatctaatttttttcactctatggcaaattagccatttcaaacattatcatggctgatattttccgtagtcaggtttaatgttttaaaagtgctgtgggaaagtgaacaaagagttccgtaagcgttgatgctatgggcggttaaataagtaatccgggttcatttttttgcaactggcgttgattacattgcataaatatccgtgtctccagacgctatataaaaacctgaagacatgaatgcgttatttactcaggtaatttcaatgcgttaaaagaaagctggcaatccaattgccagcttaagtcgaaacaaggagactcgatatttaaatcggattacattttaactttagtaatattcttcagagatcacaaactggttattgataacttattcttgggcagtaatccgcaaacgttaactttttgtttgctatttacaagctgataacaaccaggaatcttacttaggatcaatatatggagtgcgtgatggataaatctgaagtattgattagtgttaatagacgtattagttcacgaagggtaaagttcttataggcgtttactatattgaacaacgattcggacaaggatgtaaataatgaaaaggatgacatattcgaaacgataacggctaaggagcaagttatgatttttctcatgacgaaagattcttttcttttacagggcttttggcagttgaaagataatcacgaaatgataaaaatcaattccctgagtgagatcaaaaaagtaggcaataaacccttcaaggttatcattgatacctatcacaatcatatccttgatgaagaagcgattaaatttctggagaaattagatgccgagagaattattgttttggcaccttatcacatcagtaaactaaaagctaaagcgcctatttattttgttagccgcaaagaaagtatcaaaaatcttcttgagattacttatggtaaacacttgccccataagaatagtcaattatgttttagtcataatcagttcaaaattatgcaactgattctgaaaaataaaaatgaaagcaatatcacgagcacgctcaatattagccaacaaacattaaagattcagaaattcaacattatgtacaagctgaaactaagacgtatgagcgacatcgtcaccctgggtatcacatcttatttttaatcaggacataagcaactgaaattgatggctggcatgacgagggatgcagatgctgatttcattacccccggtgattactaaaggagaggctaaaacgactttattcccctggtatgtgtatccaccagtagaacccttcgttgcccgaatgctggcaggaactgttggcagaacggcaacattttttttgtcgttgacctcaccatgtcgatcactgtgcctgtatcccaccttactggctgacaaccccactatgccgctggtctgtaaatccctcatatctctcctcgcgcgcaatttaaagaaccgttatttctcaagaattttcagggactaaaatgaacagaagaagaaagctgttaataccgttgttattctgcggcgcgatgctcaccgcctgcgatgacaaaagcgcggaaaacgccgccgccatgacgcctgaggtcggtgtcgtcacactctcccccggtagcgtcaatgtgttgagcgaattgcccggtagaaccgttccttatgaagttgccgagatacgtccccaggtgggcggtattatcattaaacgcaactttatcgaaggcgataaagtgaaccagggcgatagcctgtatcagattgatcctgcacctttacaggccgagctaaactccgccaaaggcagcctggcgaaagcgctctctaccgccagcaatgcccgcatcacctttaaccgccaggcaagcttgctgaagaccaactacgttagccgtcaggattacgacaccgcgcgcacccagttgaatgaagcagaagccaatgtcaccgtcgccaaagcggctgttgaacaggcgacgatcaatctgcaatacgcgaatgtcaccagcccgattacgggcgtcagcgggaaaagcagcgtgaccgtcggcgcactcgttaccgctaatcaggcagatagcctggttaccgtacaacgtctggacccgatttatgtcgatctcacgcagagcgtgcaagatttcttacgcatgaaagaagaggtcgccagtgggcaaatcaaacaggttcagggcagtacgccagtacagctcaatctggaaaatggtaaacgctacagccagaccggcacgctgaaattctccgacccgacagtggatgaaaccacgggctccgtgacgttacgggcgattttccccaacccaaatggtgacttgctgcctggcatgtacgtcacggcattagtggatgaaggtagccgccagaatgtattactggtgccgcaggaaggcgtcacccacaacgcccagggtaaagcaacggcgctcattctggataaagacgatgtcgtgcagctacgcgaaattgaagccagcaaagccatcggcgaccagtgggtcgtcacctctggcttgcaggctggcgatcgggtgatcgtttccggtttgcaacgcattcgtccgggtatcaaagcacgagcaatttcctccagccaggaaaacgccagcaccgaaagcaaacaataacgttgcaggcttaaggggactttcatggctaactattttattgatcgcccggtttttgcctgggtacttgccattattatgatgcttgcaggtggtctggcgatcatgaacttaccggttgcgcagtatccgcagattgcgccaccgaccattaccgtcagcgctacctatccaggtgccgatgcgcaaacggtagaagacagcgtcactcaggtgattgagcaaaatatgaatgggcttgatggcctgatgtacatgtctagtaccagtgatgcggcgggcaatgcctctatcactctgaccttcgagactgggacatctcctgatatcgcacaggttcaagtgcaaaataaactgcaactcgctatgcctagtttacctgaagcagtgcagcagcaggggattagcgtcgataagagcagcagtaatatcctgatggtagcggcgtttatttctgataacggcagcctcaaccagtacgatatcgcggactatgtagcgtctaatatcaaagacccgctaagccgtaccgcgggcgttggtagcgtacaactctttggttccgagtatgccatgcgtatctggctggacccgcaaaaactcaataaatataacctggtaccttccgatgttatttcccagattaaggtgcaaaacaaccagatttccggtggtcaactgggtggcatgccacaggcggcagaccagcagctaaacgccagcatcattgtgcagacgcgtctgcaaacgccggaagaatttggcaaaatcctgttgaaagttcagcaagatggtagccaagtgctgctgcgtgatgtcgctcgcgtcgaacttggggcggaagattattccaccgtggcacgctataacggcaaacctgctgccgggatcgccatcaaactggctgccggagcaaacgccctggataccagccgggcagtcaaagaggaactgaaccgcttaagtgcctatttcccggcaagtctgaagacggtttatccttacgacaccacgccgtttatcgaaatttctattcaggaagttttcaaaacactggttgaggctatcatcctagtcttcctggtcatgtatctgtttttgcagaatttccgtgccacaatcatcccgacgattgccgtaccggtggttattctcgggacgtttgcgatcttgagcgcggtcggtttcaccatcaacacgttgactatgttcgggatggtgctggcgatagggttactggtggatgacgccatcgtggtggtggagaacgtcgagcgtgtcattgcggaagataagctaccgccgaaggaagcgacgcataaaagcatggggcagatccaacgtgcgctggtcggtattgccgttgttctttccgcagtgtttatgccgatggcctttatgagcggtgcaaccggggagatctaccgccagttctccatcacgctgatctcctccatgctgcttagtgtatttgtggcaatgagcctgacccctgccctgtgcgccaccattctgaaagccgcgccggaaggcggtcacaaacctaacgccctgttcgcacgcttcaacacgctgtttgaaaaaagtactcaacactataccgatagcacccgcagcctgttgcgttgtaccggtcgctacatggtggtctacctgctgatttgcgccgggatggcggtgctgttcctgcgcacgccgacctctttcttaccagaagaggatcagggggtatttatgaccaccgcgcagttaccttccggtgccaccatggttaacaccacgaaagtgctgcaacaggtgacggattattatctgactaaagagaaagataatgtccagagcgtgtttaccgttggcggctttggcttcagcggtcaggggcaaaacaacggcctggcgtttatcagtctcaagccgtggtctgaacgtgtcggtgaggaaaacagcgttaccgcgatcattcagcgggcaatgattgcgttaagcagtatcaataaagccgtcgtcttcccgttcaacttacccgcggtggctgaactgggtaccgcgagtggttttgatatggaactgctggacaacggtaacctggggcacgaaaaactaacccaggcgcgaaacgagctgttaagtctggcagcgcaaagtccgaatcaggtcaccggggtacgcccgaacggcctggaagatacgccgatgttcaaagtgaacgtcaacgctgcgaaagctgaagcgatgggcgtggcgctgtctgatatcaaccagacaatttccaccgccttcggcagcagctacgtgaacgacttcctcaaccaggggcgggtgaaaaaagtgtatgtccaggcaggcacgccgttccgtatgttgccggataacatcaaccaatggtatgtacgcaacgcctctggcacgatggcaccgctttctgcctacagctctaccgaatggacctatggtagtccgcgactggaacgctacaacggcatcccgagtatggagattttaggtgaagcggcggccgggaaaagtaccggtgacgccatgaaatttatggcagacctggtcgctaaacttccggcaggcgtcggctacagttggaccggactaagctatcaggaagcgttatccagtaatcaggctcctgcgctgtatgcgattagtctggtcgtggtgttcctcgccctcgccgcactctatgagagctggagtattccgttcagcgtgatgttggttgttccgttaggcgtcgttggcgcattactggccaccgatctgcgcggcttaagtaatgacgtctacttccaggttggtttgctgaccaccatcgggctttccgccaaaaacgccatcctgattgtcgaatttgccgttgagatgatgcagaaagaagggaaaacgccgatagaggcaatcatcgaagcggcgcggatgcgtttacgcccaatcctgatgacctctctggcctttattctcggcgtgctgccgctggttatcagtcatggtgccggttctggcgcgcaaaacgcggtaggtaccggcgtgatgggcgggatgtttgccgcaacagtgctggcaatttacttcgttccggtctttttcgttgtagtggaacatctctttgcccgctttaaaaaagcgtaacgtgtaaatgagagtaaggttgaacatgaaggttcagccttactctttcctgctaaccattcaccactcaacaaccagctaaccgtcaggaataccaggcttagtacacagcactgaaagtagaaaccactccagccattcgtcatcaatttgaacaacacaatactgacccacattcccgtaatcgtatgaattgtcagcttaataatcccaaacatgccgagtcttttcctcctgaaaataccgataccgcctggcaaactgcgaaagagaactagccggtagcccggcagaaatcatcagggaagagtttcacatgaagcaggtgtgagatcctgaccaatattcaaatgcgaaatatgtcaggaaaaggtacctgggctatgttgcgcaaactgatgtggcgttacaccataatattgtcgaaatgtgtttataaagtagcttgtactgctatagccacatttttccgcaatagtatgcagaggaatttgacgtaactcgagtaatcgtctggccatgctcatcctggaggcgagtaatattttactgaaacaggtattttcatcctgcaacttttttttgattagactctcgctggtatacattctttccgcgatatcgcgcagataccaacgtttggcgatatcaaagctaataaggcgttcaacttttccactaacagtgctgatgctattgaaaagtaaggggatcagttctttcttatgagaaaacatgcttaaacaggaaaggtagagcatattgctcagtatcggactatttaccccggattcattgaagctatcaaaaatcgccgtcaccagcggcatggggggactctggttaattaacaaacggtctttgctgtgtaaccctaaattgcgtggtagctgacgaatattttgtaagtaatggcaaactgtcagctcatcgatatccagtcgtcgcgtatccggactacaaaacgcaaaatcgtctgccaaatttttctccagcagcagaatactctcgttatgcaggcttattttttgctgttcatgataaatatcgaaactacgacgaatgaggatcacgctgcagacatgagtcatgattatcccttatatttcatactgcgattatttcaatttcagtatactaatgaaatgatgccagactgtttcttagcgcaaaaactgccagatttggtaggaccaaaatttatccacaaagtagttttgcataacagttaattgataataagtaaatgcagcacgaatatattttcgcacagcgtatagcttatgtttataaaaaaatggctgatcttatttccagtaaaagttatatttaacttactgagagcacaaagtttcccgtgccaacagggagtgttataacggtttattagtctggagacggcagactatcctcttcccggtcccctatgccgggttttttttatgtctgagtaaaactttataatcttattccttccgcagaacggtcagtgccgtaaaaattcccttgcgcaacaatacttgccgcgctgtcacggttgctcaatctctgcgcgcttcgctcctgatactctgtgggcgtcatcccataataatttcgaaagacgtaaatgaaatagctcacgctgtgatatccacaggatactgcaactcgcttaatactaaaaccatgtataacaataagttgcaaagcacgttgcattctacactcagtaagcaactgactataacttgtctcttcttcgcgcaattttttctttaacagacttggactcatcaacagctcgctggcgattcgggctagtgtccactcatgggcgatattattattgataaccgtacaaactcgtgttcgcatgttcggttgtaaaacgttcagaagcagcggtataaagtgctcatcctcaagaaaaacagataacaacgcaaagattaatgctcttttacgtagcatttctgcatagcgaagattcttattctggcttagttgcgcaacttcctgaaaaacaggaatatctctactacagtgatgaacgagtaaactagaaacttttttatgtgcatgaagatttaatgcctcctccttgagcatcgggagaaataaactaagcgtgtccctactcacgaatacaaaattttcaacacacttatctactcgaatttggcttgcatccgcaaaaaccaggtcaccgccattaaaatagcgatattcaccattaaccatggtgagaatatatttatgtcttgcatacgcaattagacaattcccatgtagactttgcatagttgacttaatattacataaacatattactgtttattaatgtagcacgccgccctcttaagtcaaattgattgataaataaatttaaacgaagcgggagaacaggatgataatgtgtgatgttctacgggcaggatgactggatttataatacaaaaacgtgtttaagaacacagggaaattaatagtaagcaaataatcccttttcgtgacattaaaggtaatcgctacatttaataaacattcatataacatatatcttatcaacacgatgaatagacagccaatatattattgcgattaataagcaaccgaatgcccagctgtttttttaaaggctgggcattcggtttttacaacgttatgttatcaggtgtgtttaaagctgttctgctgggcaataccctgcagtttcgggtgatcgctgagatatttcagggaggctttgtagtcttccagcaacagttcagcaaagtccatttcgaagccgcgacgacacataatgcgcatcaccacgatgtcggtggcttcaccgccgagagtgaaggccggaacctgccagccgcgcagacgcagacgttcagagaggtcgtacagggtgtatcccggatcttcaccatctttcagtttgaagcaaaccgccgggatgccttcgtccgggcgacccgtacagatgaactcatacggccccagtttggcgatttcatccgccagataagcggcaacctggtaagaggcgttctgtactttggtatagccttcacgaccgaggcgcaggaattcatagtactgtgcaattacctgacccgccgggcgggagaagttgatggcaaaagtaccaatttgaccacccaggtagtcaacgttgaacaccagttcctgcggcagcgcttcttcgtcacgccagataacccagccgcagcccagcggagccagaccgaatttatggccactagcactgatgcttttcacacgcggcaggcggaagtcccagacgatatccggggcgacgaacggtgccaggaagccaccgctggcagcgtcgatgtgcatgtcgatgtcgataccggtgtcggcctggaatttatccagcgcatcgtgcagcggttgtgggaactcatagttaccggtgtaggtcacgccgaaagtcggcaccacgccgatggtgttttcgtcacaggcttcaatcatgcgtttcgggtccataaacaactgaccggggcgcatagggatctcacgcagctccacatcccagtagcgggcgaatttatgccagcagatttgtaccggaccgcacaccaggtttggtttatccgttggtttgcctgcagcttccatacgcttgcgccaacgccatttcatcgccatcccgccgagcatacaggcctcggaagaaccaatggtgttggtgccaacggcctgaccatttttcggcgcaggcgcatgccacagatcggcaaccatatttacgcaacgcaggtcgatggctgcggattgcggatattcttctttgtcgatccagtttttattgatgctcaaatccatcaatttatggacgttttcgtcgtcccaggtctggcagaaagtggccaggttctgacgagcgttgccatcaagatataattcatcattgataatctgaaatgcgacatcatcgcgcatttcgtgcagcggaaatcgtttactctccgcgatagtagaaatggcctttgcgccaaaacgactatcgagtagttcactgcggaaatccgttaacagcttctggtccatttcgaactccttaaatttatttgaaggcaataaaaaagtaggatttatccgcaatggaagcaaggcattacaggcttaatttaaataacaaaatcctaagcagaaaaacgactttttataatataaacatttaacatgataatattaaaaacagactttattatcgtaataaaaatcgcccaaacattgctgttcgggcgatcaaattaattattgtttatcctgcatatacggcgtgtacaccccgttcagactgtgcaggaaagctacgatatcatccacatcctcctgcggcagctctttgcctacctgatagcgcagcatcagtttcaccgccccgtccagcgtcggcacgtcaccgcgatggaagtacggtgccgttaaagcaacgttacgtaaaccgggtactttctgacgcaatttatcacgctcttctttagtcacattcatacgaccaatatccgccgccgtaatttccccaaagttaaagtcttttttcagccccaacggttcaaaggaacgtccgccgagaataataccaccatgacaagttgcacatttattatctttaaataattgatagccttttttctgttgcgccgtcagcgcattttcatctccgcgcaaccatttatcaaatggggaatccggcgtaattaatgttttctcaaattcagcaatggcatcagtaatattttcgccactgaaaccttgcggatagacttcgaggaactgcgttttaagctgcggatctttttccagcttagcaataatttcgtcccaggatttgctcgccatttcaatcgggttcaacggcggtccaccagcctgatcctgcaatgttgccgcacgaccatcccagaactgctcaacgttaaatacactgttaaataccgtcggcgcgttaatcggcccaactgcgccaccaacaccaatgcttgtttttctgccatcgacgccccccgcattcaacgcatggcaatgagcgcaactaatggtgctatcagcgcttaaacggggatcgtgatacagcgcaaaacccaacgccactttttgcgcatcggtaggcagtttttgcgggatgggctgcaccggttcattgcgatgttccggagcagtatcattgctggcgtaatattccgcgcgctgttttgcaatccaggccagtatttccgcccgctcttcatcactcaccttacccgcccagtgtagcgcggtataacgcgttggtggcatagtttcatactgcatcacccattcaatcttattcaaatcgctttggctaacgggtttatcagccagcagtgccgcacgcacggcctcaaggttaaaagatttatatccaagcttaatgtcgtaatccatcaactgtttcgcgccaggaatataataataggcgggtaattctgcgctaggcgtgtggcaatagtcgcatcctttttcgcggagaaagcctaaaaccttattattttcactgacagcagatgcctgaacatcggcctgtttactgcgtttattatcgtggtaccacacataaccagataaccctaaatagcaaatcgcgacgccagccaggccgatcgcggtaatacgactgaccattttcattattcttccctcacggtggtgagttattgtgacccagaaaattttccagaatgctgcaaacgtctctgcgagacaaagccatcataaaaaacagggagatacgctttttgataggaatcaatcaattacatgaatataaactatcaataagatagcctgtgcctattacccagatcaggaatggcatatcatgattgcggcgagagcaggattgaatgttctgaaaatgaaaaacaacaccaaatcggtatttttataaattccattgatattagtgcgttatattttttgacaggttaataaacgtgatccaccgcacgctttgtcgcccaccaggcggagcgaatgactacccttaaagaaaagccgataattagcgacgaatttcggaggttggatccttatgctcaatcagaaaattcaaaaccctaatccagacgaactgatgatcgaagtcgatctctgctatgagctggacccgtatgaattaaaactggatgagatgatcgaggcagaaccggaacccgagatgattgaagggctgcctgcctctgatgcgctgacgcctgccgatcgctatctcgaactgttcgagcatgttcagagcgcgaaaattttccccgacagtaaaacctttcccgactgcgcacctaaaatggacccgctggatatcttaatccgctaccgtaaagtgcgccgtcatcgtgattttgacttgcgcaagtttgttgaaaaccacttctggctgccggaggtctactccagcgagtatgtaagcgacccgcaaaattccctgaaagagcatatcgaccagctgtggccggtgctaacccgcgaaccacaggatcacattccgtggtcttctctgctggcgctgccgcagagttatattgtcccgggcggccgttttagcgaaacctactattgggattcctatttcaccatgctggggctggcggaaagtggtcgggaagatttgctgaaatgcatggccgataacttcgcctggatgatcgaaaactacggtcacatccccaacggcaaccgcacctattatttgagccgcagccaaccaccggtttttgcgctgatggtggagttgtttgaagaagatggtgtacgcggtgcgcgccgctatctcgaccaccttaaaatggaatatgccttctggatggacggtgcagaaagcttaatccctaatcaggcctatcgccatgttgtgcggatgccggacggaagcctgctcaaccgttactgggacgatcgcgacacgccgcgtgacgaatcctggcttgaggacgttgaaaccgcgaaacattctggtcgcccgcccaacgaggtgtaccgcgatttacgcgcgggggcggcctccggttgggattactcttcccgttggctgcgtgatactggtcgtctggcgagcattcgtaccacccagttcatccccatcgatctgaatgccttcctgtttaaactggagagcgccatcgccaacatcagcgcgctgaaaggcgagaaagagacagaagcactgttccgccagaaagccagtgcccgtcgcgatgcggtaaaccgttacctctgggatgatgaaaacggcatctaccgcgattacgactggcgacgcgaacaactggcgctgttttccgctgccgccattgtgccactctatgtcggtatggcgaaccatgaacaggccgatcgtctggcaaacgccgtgcgcagtcggttactgacacctggcgggattctggcaagcgagtacgaaaccggtgaacagtgggataaacccaacggctgggcaccgttacaatggatggcgattcagggatttaaaatgtacggcgatgaccttctgggtgatgaaatcgcgcgaagctggctgaagacggtgaatcagttctatctggaacagcacaaactgatcgaaaaataccatattgccgatggtgttccccgcgaaggcggcggtggcgagtatccgttgcaggatgggtttggctggactaacggtgtggtacgccgtttaattggtttgtacggcgaaccataatatttttacagccagccgctaacttcctgctggctgtaaaattatcctcttcaggaggagatatttaacatcattgccgcctgggtgcgatttttcacttccagacggcgatacagggattccagatgcgcttttaccgttccggtactgatattcagcgctctgccgatctccttattactttcgcccgccgctaacatggttaaaatctcccgctggcgggcgcttaagcttttgagatctttaatgtccttttccggcgtcgtccgccagtctccaggcagaaacatcatccccatcgccgcactatttaccgccaacgcaaatgtctcgacggtactatcacgaggcacaatggccagcacattaaaatggataacttcctgtaaccaccgtttattgcaatccgtcgccgtaattaacaccttaacctcaggaaattgcaccacggttttttgcagcaaccagtagcaaaactcaccatcctgatcgccatcgagcataactaaggcttcagggtaactttccagcttttgccataactcgtctgcctgactggccccctgaatactcactcctggaatacgctgctgtaaactgattttcattccatgaataaatatactctgcctgtcaaacatgactatttgcataactgaatctccacctgaatacgttaaaaagacttaagtagtggaagggtattacccgcgagaaaaaataagaattcgccatttggcggtggccattctacagagatgacgtgtagaaaatagttaccgatataaatagttacagctaaacgcctgaaattacatgtcgagggcactatttaaaacaattttgaggatttccttatattggtggttagtacgcatgcaattaaaaatgaaattccgcgaccacaagccaaaataacaaacggcaaggagacaaaaataagcacaaatagccaacacgtcctctgttcactttaaagggaatcgctgaaaaatacgctctgtttaaggggattcacctttctcagaaagctattccgcccttttcctgctgagaaatcgccacattcggcatgacaacattgtgaaacccggcattagatgttagaaaaaacaataaacaatgcgatatgcgcgttactgtttcgctgtgaacaacaaagcgtcaaagaaatggataaaattcacgcaatgcagttgttcatcaaagtcgcggagctggaaagtttttcccgcgcagcggatttctttgctttgccaaagggaagtgttagccgccagatacaggcactggaacatcaacttggcacccagcttctccagcgcaccacgcgacgggtcaaactcacgccagaaggcatgacctattatcaacgagcaaaagatgtgttgagtaatctcagcgaactggacggtctgtttcaacaggatgccaccagtatcagcggtaaattacgcatcgacatcccgccaggaatcgcgaaaagcctgttactgccgcgcctgagcgaatttctctatctgcatccgggaattgagctggaactgagtagccatgaccgtccggtagatattcttcatgatggttttgattgcgtgatacgcactggcgcgttaccggaagatggcgttatcgcccgtcccctcggcaaactgaccatggtcaactgtgccagtccgcactatctgacgcgctttggttatccgcaaagccccgatgatctgactagtcacgcaatagtgcgttatacaccgcacctgggtgtacatccgttaggttttgaggttgccagcgttaatggcgtccagtggtttaagtctggcggcatgttgacggtaaacagtagcgaaaactatctcaccgccggtcttgccggtctggggattattcagatcccgcgcattgccgtgcgcgaagccctgcgtgccgggcggcttattgaagtattacctggctaccgtgccgagccgctctcccttagcctggtttatccgcagcgtcgggagctttcccggcgtgtaaacctgtttatgcagtggctggctggcgtaatgaaagagtacctggactgaccgactatactttttaagaatgaccacgacagaaggacaaaagagcggatgacgcaggaaaacgagatcaagcgtcccatccaggatctggagcacgagccgattaagccgttggataatagcgagaaaggcagcaaagttagccaggcgctggaaaccgtcaccaccactgccgaaaaagtccaacgccaaccggttattgcgcacctgattcgcgcgacagaacgctttaacgatcggctgggtaaccagtttggtgcggctatcacctatttcagttttttgagcatgataccaattttgatggtgagctttgccgcagggggctttgtgctggcctcccatccgatgttgctacaggatatcttcgacaaaattctgcaaaacatcagcgatccgacgctagccgccacgttgaaaaacaccatcaacaccgccgttcagcagcgtacgactgtagggcttgtcggcctggcggtggcactttattccggcatcaactggatgggtaacctgcgtgaagcgattcgtgcccagagccgcgatgtctgggaacgcagcccgcaagatcaggagaagttctgggtaaaatatctgcgagattttattagcctgattggtttgttgattgcgctgattgtgacgcttagcatcaccagcgttgccggtagcgcgcagcaaatgattattagcgccctgcacctgaacagcattgagtggctgaaaccgacgtggcgattgattggcctggcgatttccatcttcgccaactatctgcttttcttctggatcttctggcggttgccgcgccaccgtccgcgcaaaaaagccctgattcgcggaacatttctggctgctattggttttgaagtgattaaaatcgtgatgacctacaccctgccaagcttgatgaaatccccctctggcgcagcatttggttccgtgctggggctgatggcatttttctacttcttcgcccgtttgacgctgttttgcgcggcgtggattgccaccgccgaatataaagacgacccgcgaatgccggggaaaacgcagccttaaaataggccggatgcggcgtaaacgccttatccggcatacgattttattcggcctggctccccgtaggccggataagatgcgccagcatcgcatccggctataatgcgcacataacctcttgaaactcgtccccagagcctcttcagccatctatttgggagcaaacaatttcattccaactcataaccccagcatataaatccagttggtaacttttatttaacctgaaaccagttttatccactatttataaaattatgtgaagcatttcatagaagaaaaatcactggcctaaacattatcccctttttgcctgatttttgaccatttccgcgatttgttacacattgaaatatcacttttgctgtgcgtaatatggctattcgttagccaaaaaataagaaaagattatgcaagcaacagccacaacactcgaccacgagcaagaatacacgccgatcaacagccgtaataaagtccttgtcgcctctctcattggcacagccattgagttcttcgacttttacatttacgccactgcggccgttattgtgtttccgcatatcttcttcccgcagggcgatcctacggcagcaacgctacagagcctcgccaccttcgccatcgccttcgtcgcgcgccccattggctctgccgtttttggtcattttggcgatcgcgttgggcgtaaagcgacgctggtcgccagcttgctaacgatggggattagcaccgtggtgattggtctgctgccgggctatgccacgattggtattttcgccccgctgctgctggcgctggctcgatttggtcagggtctgggcttaggcggtgaatggggcggcgcggcgctgctggcgactgaaaacgccccaccgcgcaaacgtgcactgtatggctcctttccgcagctgggcgcaccgattggcttcttctttgccaatggcactttcttgctgctttcctggctactgaccgacgagcagtttatgagctggggctggcgtgtgccatttatcttcagcgcggtgctggtcattatcggcctgtatgttcgcgtgagcctgcatgagagcccggtgtttgagaaagtcgctaaagcgaaaaaacaggtgaagatcccgctgggtacgctgctgaccaaacatgttcgcgtaaccgtactgggtacgttcattatgctggcaacctatacgctgttttacatcatgacggtctactctatgacctttagtaccgccgccgcgccagttgggcttggcctgccgcgtaacgaagtgttgtggatgttgatgatggcagttattggttttggcgtgatggtgccagtcgctggattactggctgatgcctttggtcgccgtaaaagcatggtaatcatcaccacgctgatcatcctgttcgcgctgttcgcctttaacccactgctcggttctggcaacccgattctggtttttgccttcctgctgctggggttaagtctgatgggtctgaccttcgggccaatgggtgcgctgttaccagagctgtttccgacagaagtgcgttacaccggagcaagcttctcttacaacgtagcgagcattctcggggcttccgttgcgccatatatcgcagcctggttgcagactaactacgggctaggtgcggtggggttatatctggcggcgatggctggcttgacgttaatcgccctgctgctgacccatgagacgcgacatcagagcttgtaataagagtgaaaagcctgatgcgctacgcttatcaggcctgaatttccatacaatatattgaattcgcaaggatttgtaggccggataaggcgttcacgccgcatccggcatgaacaaagcacactttgccaacaatctaaatctgtttaattgccggatgtcagacatccggcaattatcatcacttcttcatctggctcaaaatcgtccgacactgattagcctccccttcggaaggactgatcagtgccagtaacgccgccgccggtgttaccagcgttgccagtgccgcagcaacagcaccacgggcaatcagcggtccggctttcaccccagcctgcggatttttaaacgtcccccgcacatacagcgggctacgcagtgtgataatccgaattcctttactctccggatcaatagtcaaatccagctgttcgctagcaaaacttgccgtgccggtaacattaatcaacgcgttctcagtatcgaaagcaaaaatctgcgggcgcgccacgccgttggcaatattcagattcgccgccgcgcagttcacccgcacctcatcatcaccaaatatcgcaccgacaatgtagttgccgacattcagcccaacaatctccatcaggttgcggctcaccagcccgtcattcatcaacagtttcaggttgccgttactgttgcctaaaagtgccgccacgctgttaccgctaccgcgtagttccgcgtcaccgttcatttcccccagcgtcttctgcatcagttccacatcgggcatcagttctttcagtttcagtcgacgagcctgaatatctgcccgcccctgcatcggctttttatcgccttccagatgaatattcgccgcaatgctgccgcccgccatgccaaatttcagcggttgcaggcgcaggtcagcatttttgaggatgatatgagtagaaagatcgctaatcggcaggctactgccatgctcaatgcgccgccctttgaagcgaacatcggcatccataacgtcccatttatcggtttcgaagcggtcataaggcagcactttgcccgcaggctgaacgcttttttcgcccttcttctgttcagaccgtttgctcttttctgcccctttcccggaatcaacgccaatcaacggtcccaggtccgccagccgcaattgccggctctcgacatcaccttccagttttggtcgtggctttccggtggtgtagaccagagaaccgtggatatcgctatcaccaattcgcccattaaaaccgcgataatcaaagacgctgcttttttcagtgtcgattttcgctaccagccgaccatccgtttcaaacggcggggtatcgggcagcagaacgcccgtcagttcatagagatcacccagactatcgccagaaaatttaagccgtaaatcgacaccgcccatcttcattgggtcattcacgacgccatcaaaagcaacacgggtgttaccagagcggaaatcagcctgtaccggaaacggcgtcccttcgccacgcagcgccagcataccgcctatttttcccgtacccgtgagcggttcaccgttatatcgtccctgcgccttcaggccaaaaacgtaatcgcccaccttttctttatccgctttacctttgcttccagtaacttcgctgaacggcagcggcttgcctaagggatcaacaaaaatctccagatccgctttgcttactttgtcatcaatggcgatccgcccttgatcgaaaagaatattatccagccgaaagctccatgcgctcggctttgcattcgcgtctttgttatcatcgttggcaagattaaacgtccagttattgttcttttcagagaggcgaatcaggcgcgcgtcgggcttttcgagcttgatccacggcagccagaccgttttggtcagcagcgccagcggggccagcgttgcctctacgcgtggcaaatgcaccatcgtgacttcgggaatatccggtggattgccaagaatgatgtcttccgcgtgtacatggggccacggcacccagctgcgccagccagtttcttgtttttgccgctcccacaccacgcccagatcgccacggatagcgaacggacgattcaactccgcagagactttctggttgatagtcggtttgagtcgattccagtcaaaagttgcaatcaaaatgatcgccacgacaatcaacaacaagaaagccccactaatcgcagcggttattttgcctgccttgctcatcgttcgcttcctcatattcttcctgtgccagtcctaaagatagtccagccaggcggaaaatgaggcagcttatagcgccagaaccgccgtattcagcgtttctatcggtgccgggcgactaagaaaccagccttgtgcggcgaatgcggggctgttctgaacatcacgccactcttccggcgtttctacgccctcgacaatcaccccgcgacaatagcgattcattagatgtaaaagctgagaaaagagtgtgcgtccttccgggctctgacgcagcatcacaaacagttctcgcgcgattttgatgtagtcataacgcacttcacttagcgcagagaaatttgccatcccggtaccaaaatcatccagccacagcgggccaaattcacacatgctggcaaaggtactatctttcggcagacggatatgctccaccagttcgaaacgcagccagggaagacgctcaatctggcgcaggatttttggttgctgacgcagggcgatgagcgtagggccatcaatattgacgcttgccagcaggccgtgctctataaagaagtcggctttttgcgccagcaaatcaatctgctctttcacaacctccatccgatggctgacggtgatttcagtaaaatagcgatccggcggcaggcgttggctagggttcaagggatgcgtgaccaccgttaatagctccacggccattaaccgcccgcatgtttgatagatcggctgccaggtgtaagcacgctcacactgcaaccaaaaacgccgttcctgcaagctctcgatgcttgcttcagggttgcttattcgctggataacctgccttatcatcaaagatgtcctgtgtttaaaagtgatgctgcccggactcgacaaagattatcggcgcgtaagggcagaactttaccgcctggccggggtaaatttcctcactccacaacggaatctttcaggaatacgttctggctcaaaaaaataatggaacactgttttaatatggttgaccagcaaaccaccacagcgcaaactaacgctaattttttacagatcaggttcacgactatgtccaaaaagattgccgtgattggcgaatgcatgattgagctttccgagaaaggcgcggacgttaagcgcggtttcggcggcgataccctgaacacttccgtctatatcgcccgtcaggtcgatcctgcggcattaaccgttcattacgtaacggcgctgggaacggacagttttagccagcagatgctggacgcctggcacggcgagaacgttgatacttccctgacccaacggatggaaaaccgtctgccgggcctttactacattgaaaccgacagcaccggcgagcgtacgttctactactggcggaacgaagccgccgccaaattctggctggagagtgagcagtctgcggcgatttgcgaagagctggcgaatttcgattatctctacctgagcgggattagcctggcgatcttaagcccgaccagccgcgaaaagctgctttccctgctgcgcgaatgccgcgccaacggcggaaaagtgattttcgacaataactatcgtccgcgcctgtgggccagcaaagaagagacacagcaggtgtaccaacaaatgctggaatgcacggatatcgccttcctgacgctggacgacgaagacgcgctgtggggtcaacagccggtggaagacgtcattgcgcgcacccataacgcgggcgtgaaagaagtggtggtgaaacgcggggcggattcttgcctggtgtccattgctggcgaagggttagtggatgttccggcggtgaaactgccgaaagaaaaagtgatcgataccaccgcagctggcgactctttcagtgccggttatctggcggtacgtctgacaggcggcagcgcggaagccgcggcgaaacgtgggcacctgaccgcaagtaccgttattcagtatcgcggcgcgattatcccgcgtgaggcgatgccagcgtaaacgcagcatatgcaaaaggctggataaagtgttacccctctatccagctcatccataaatacctgatggttgtgctaactcatcaccatcaggcattactgtgcaggtggaatatccgtcacttcaggatgtacgtcatccgtggcgacagaggtggtcgcagcggcggtagatggggccatgatttgatcccagaccgcctgcaacgctttcatgttaaattccggctcgcctttcggctgcagcagtattaacgccatatcattgctcaactgttgacgcagatcctgatttaacatctctaccgtcaggctattaaggaaatcctgccgcagtttctgatattgctccggcgcgatatcgacaacctgattttgcaagctacgcatccgctgacccatcagaatatcggtatcagctcgtgcataggcggcaaacagtttctgcagctccagtttcttttgcgccactaacgcattgaactcttcttccggcagacctttatcgcgaaccttcgccagttcacgcgccaccagattaaggttgctgttcagcttgtcgtttggactttcgatgttgatggcacactgcgcacgcagatacagcacacggcagtcaaatccaagaccgatgtctttgctgttactggcacttaacgcttgctgaacatgccagaacagcgcctcgcgggccaggtccgcacgccagtagcgcagcagtgcggcactttcacgaatcggctgccacggcgtatcccacatgatagataaccggtcctgacgcaccgcgtcagtcataatactcaccgcttccgcacgcagcggagaaagcgtcggcaccggagctggcgtttcacgtttgcctttcagttcgccaaacgttttgtttatttggtcgacaacgctgcgcgcatccacgtttcccaccaccagtagcgtcattgcatccggggtgtaccatttctgatagaaatctttaattttttccgcttcaacgggttgtttcagcggatcggcaggatcgtgacctaacaaggtactccctttcagacgatagcgccaccagccctctttagtatcggcaggccaggttgccaccatgtcctgactttgcagcgcgtggttgatggtttctggtgtgatggtcaatttgccagtggcatttgccagataagagagcgcttctttcagcaaatcgttacggttattgggcaaactcagattaaacagcgtggtgtcataagagacaattaccggcggcatcgggcgtttagggtcgatcccctgctgccacaaactacgcgcctgtgctgcgtcaaggccaccgctttgcgttagcgcaatacgagggatggcgtgactgtaaccgctctgttgtgtactttcggcgaggctaccggtattaaccagcaggcgaatttcaacacgatcgctgggacgctggggggtggtcagcacttgccactgtaaaccgttggaaagcgtcccctgttgccatgctggatcaggctggagcgcatctgcctgcacatagccagcagtggccatcatcagcaaaccgcccgctaaaagtcgaatttttgtgccctgcatgtgaacccctgatcaactatcctggtaataaaaaaactgcccgttgtcggtcagtctaaatgacgttaaaaacacttcgtgttagaccgcaagaacatgaaaatgtcacggaagaagtgaaataaacctgaactcacccaggtggtaagttcaggcacaggggtcaattatgcgcaaacacccgcactcggggaagggagtgcgggcataagtgatgagattaagaggataattcgtgcgttttgccatccggcgcacgattattcagcacatcgtccagttttttgtggtccagttctttcacccacttagcaacgacaatggtcgctacgccgttaccgaccaggttagtcagcgcacgagcttcactcataaagcggtcgataccgaggatcagcgccagacccgctaccggcaaatggcccaccgcagagagcgtcgccgccagcacgataaagccactacccgttacccctgccgcccctttagaagaaagcagcaacacgattaacagcgtgatttggtggacgatatccatctgactgttagtggcctgggcgataaacaccgccgccattgtcaggtatatgcttgtgccatcaaggttaaagctgtagcctgtcgggatgaccagccccaccacgcttttacggcagccgagtttctccatcttgtcgagcatacgcggcagcgcgctctcggaagaactagtccccagtacaatcagcagttcttcacggatgtagcggataaatttgaagatactgaaaccagtcgctttagcgatactacccaataccagcaccacaaacaggatacaggtaatgtagaaacagataatcagctgccccagttgcaccagtgtgccgacgccgtatttaccgatggtaaacgccattgccccgaacgcaccaataggtgccagacgcatgatcatattgatgatgccgaagatgacctggctgaaactttcgatgacgttaaaaatcagttggcctttgctgcccagacggtggagcgcaaaaccaaacagtacggcaaacagcagcacctgcagaatgttaccgctggcaaatgcgccaatgacgctcgccgggatgacatccataatgaaggcgacaatgccctggtctttcgcctgatcggcgtaaaccgctaccgctttcgcatcaagcgttgccggatcgacgttcattccggcaccaggctgcacgacgttaacgatgataagaccaataatcagcgcgatggtactgacaatttcaaagtaaagcagtgcgactgcgccggtacgaccgaccgccttcatgctttccatgcccgcaatgcccgttacgacggtacaaaagatgacaggagcgatgatcatcttaatgagcttaacgaagccgtcgccaagcggtttcatttgctcgcctatttcaggatagaaatggccaaggagaataccaatggctatcgctgtcaggacctgaaagtaaaggcttttaaacagagaggttttcatagggtgtcctttagtaaaaccacaggtcttgtaaggttatggggtacctgcggccttaaaataacacccagacaacatcacagaaatgtacctggatcataattgaaacaaaaaggttaaaaagtttgagctggctcgcacaaaccagcactttttaaagttttgtaatcagtttggggtagttacttttcttccaggtaactctcttcgaagatttcaatagggagtgggcgagcaaaaaggaagccctgggcaataccaacgcccgcttttgccagccagtcgcgttgtgcttcagtctccacgccttcggcaatcatttgtaagttcaggctctgcgccagcatgataattgcagcaatcatgctgctatctcccggcaagccttcaacaaacattttgtcgattttcagtacgtcgattggcaagcttttcatatgctgcagctgacgcagccctgcgtagcccatgccgaaatcatccagcgccacccgaactccggcattgcgcagcggacggaggattgccaccgcagcatgagggtcgtcaatacgtcggctttctgtcacttccagaatcagtgttcccggctgaatgcgatagcgggttaacagttccagcatatccgccaccatattcgggtgcatcagttgcagcgcagagaggtttacgctcaagggcagcataatgccgcgctcttgccaggctgcaagcaatcgacaggactcttccagcacccagtgaccgacggtaaccatcagcccacagcactcaatgcgatcgattaagccatccggcaggtcccaactgccatccggttactggatacgcagtaacacttccgcactgaccagtttaccgctggtcatctcgacctgtggctgtaaccaaatagcaaactgatgattttccagtgcattaaggatatcgctctcttccgtcaaccgcttctgggcggcttccatctgctgcggatcaaagaactgaatctgattcttgcctttatggcgagcggtaaatgccgcagaaatagcgcgactgtaaagctgttcggcggtgagatcgccgtagaacatcgccacgccaatgctacagtgcggacggagttgaatacgttcaatcggcaggcgctcgctcatgatagtgagcacttgctgacctaaggtgattgcgtgccacggttcctgtacaccgttggcaatgacagcaaagtcataaccgctaatctgcgcgaggatcatacgtgggctcagtacgcttttgagtttttccaccagcgtcagcagcagaatttctcgttgcgcctctttcagcacgcccgcagtatcacgcagggtttcacaggtgatgatcatcagcgcggtggtttgtttacgcgcgacaacctgctccagcatctccatcagcaaggctttgttcggcaaatcgctcaccgggaagcgcatcgcattttcgttctgttcttcataatggcgctgcagcaattgctggttgaggttgtaactgcgcaccaacataccgatttcatcgtcctgatgcagacgcggtaatgccagttggtgaccaacaagctccttggctgggatggcgttaagttcgcgagcaatattgcgtaacggatgcaaaatcaggcggttaatgcaccagctgatggcgacggtcaggataaggctcaaaagtaagtaaatggtcactaacgtactgagggtgctcatcacgaacttatacatacggaaggaatccgcctgtagtaccagataggcaattggctgcgggtttgccggacgttcgaggctgtaaacgcccaggctgatttgaaccggtagctcaaacaggcgagtaaccattaccggcaccgggcgctctggaataaaacttttacgcagcgcctggaactggttaggcagcactacatcggcacggctgaccacgcctgccggtttaatgctggcaagaatagcttccgcttcgggaatatcgcctttcaaaatagcactagataagggttcgcggacagagcgagcaatgctttccagttgcgtagccgtgttatagcgattctgctggaccagatggaacagcaaaacggtgcaaaaaataaaaacgaacaccaggacaacggctgccaccattgccatctgcttgattgttaacgagcgacttacgcgcaaattgtctccccccggaaatcccagattgccgcccgagtatacccgatcgcagcggcattaagagaggcgctatctgaaaacttaccagtcggcgtaaggtatcagcggctgcggcggtaaatccatgtcaccctgccatccggcggcggaataacgtacgtagagcaggaaatggctgggtgcgtaatctttcgcctgctggatatcaattgccgtgccaacaaaccagttggaagtaacacgtcgttcaagtaatgcccgcgccgtgtagccgaagccctgactgctgccgccatcgttggattgccgcgcagcttcttcctgccagtcggtcgggatcagattcatcagcggataacgcggcatggttttggtgcgactatggctccagctgccagacgcacccagctcccagctccagttttccgtgcgctcccgccacatcaccggtatggcaaagctcaggtattcctgcggactgtagtaaccgccctgaccgagactgtagccactcagatctttgtcgtaatgccagatcatgttgttcaggccgattgtgacgcggcgattgttctggttaatgaccttatagtaatagcccgtcatccagcgcacgcgccagttatcttcgacatttttaccggttaactggtcgccactaaggcttgcccagacgccgtttgcttcacctttatcgtagctcagacttagccccacaccgtcggcacgtacgccaccccattttttcccggtattgctcggggagtctttttgcccaccaaaggccagcaaagaactggagatgggccgacggtgggcgttaacggtgtaacccagcggcccgatatcatcgctgtaactgatgccgccgaccacatccaccacgttgaagcccatcggcgtggtaccgatatcccagctccagacgtcatttcgccagccgaccgccacgctggcaccggaatcgctctggctgcggttgccgctacagtcctgtaatgtacaggtgccccagttgtcatcccatttgccatcggcattagtggagaaactgccgacgttcatattgacgaaatcactgcgaaagaacatccgcccgtcagaatacggcgcatccacctgcaacatggtagtgtgcgctttcagatcggagtaaccaccggtgccgctgctaccccagtaatcgtgctcaagggtgacgttaagatcctgctggcgatagaggtccgccgcatcgctgcgcacgccacgtttcagccagtcatctttctcgtcgttacgggtcagtcgggtaaaggtgtcgttatcctgcggacgcgtcgtagtcacaccggatgcgaccatggcgtctttgtaggtttccagcgcctgcgttggatcgcccgcctgcgcttcaaacttcgcaccatcacgcagcaccatcgcgctttccatgctcggtggctgagattttgcctgcgggatcaacttattaaacgtccgctgcgctgctgcggtatcgccaagctgcgcctgtgccagcgccacgcgccgctgtgtgttcaggctggcgttatcggtagcgggcagtttcgccagctggctacgtgccgccgctttgtcaccggcagcaatatccacttccgtcagaccaagaatggcgtcggcgttagctggctcccgcgtcaggacattctgatatgcagcgcgggcggcggtgtaatcacgtcgttgttgcgcccagtcagccagcgtgaggtcaatacgcgtggaaggtggttgctggcgcagcatcgcttccgcttctgcctctttgccgctttctcgcaggcggttagcggtttccagcacctgatcgctttgcagtcgattaaccagctcctgaatattgctgttccactgcgcacgcggcaggctattgatatgcgccagcgccgctctgtcctggtcatgaccagagaggtacagcccgtaagcgtaaacctgctccgggtcgttgctcttctgctgcgccagattgcgcattaacgtatcggcctggctgcgttgtccggcctgccagagatcctggctaagtcggtaagtaatccatacgctgccggggtccagcgccagtcgttgccgctgaagtgctgccgcctgcgcccatttgccctggttttccagtgcctctgcctgctgtgccagacggtcgttttgcaggctgcgttcgatatcatcaatgctacgccgctgactggcagagaggctggcgataaacgcttcagctttttctgggctttgctggcggtaaatatttgccagcccgcgcacggcgttagtgttgccgctgtccatacgcaaggtctgctgataataacgttcggcggcgggataatcttttcgcgccatcgccacatcgcccagccccagcactgcataactgtcggtgttatcgacattacgcgcctgctggaacaggcgttctgcccggtcaggattattggctttcagcgcagcatcgccctgctggatcgccagccagtagcggtttactttcagcagactgttccatttgtcgttgttgctgctgtgcgggtccagtgcgagggctttttccagattcgccactgcattggcgcgatcgcctttctgagaatacgcctggcccagcgcccccagagcttcactgtctttcgggttcgcccgcaccgcctgttgtagttcgggaatggctttacccgccataccagagtccaccgccgctaaaccttgcgcacgagcgcggaaagcaggatcggccagctgtttttgctgttctgccagttggctttgcgcagccgccacgctatcgccatcactaaagatgctgagatattttttcagcgcgctcacactggcatcactgacgggcatgtctttaatctgcccgtaccagattttagaggccccttcgcgcccggcgttgctttttgccatctgttccaggacggcaaaaccttcgtcacggcgatcgctactaaacagcaatagcgccagattgttttgcaggcccgtattgcccggtgcatccgcattgatgcgttttaactgattaatcgcttcgccacggcgagccggaattttcgccaccgtactccagtactcgacagcaatgtcaccttccggcggcgcaccgttgaacagtttgttgtaactcgccacagcttcttctgcatgaccggtcgtcgcctgcaatcgtgcctgttgcagtgcctgacgaccatccggcgtggaaagtagcatcgtagtccggctgcttttatacgcattactactcggcgctaactggctcagccgatcgagctgtttttgcgcgccatcaatatcgccctgacgtaacaaagaacggaaacgggcggcaacgacgtccgggttattcggatcaataagttccagccgatataagctctgttgcaccagatcttcacgatgggtcgcttcgcctaaccgaacttgctccagcaactgttgctgagcggttggtgctgcctcgaccatcggcatgacggccagaccgagggaaagcgtgaatatgtttagtgtgaatttgcgcattcctggccccagtcaggtaattactttagtgactatttgcgcattcctggccccagtcaggtaataactcaccttttgtgctgaagcggaaacggtgttgatcccagccttgtccaaacagggtcagcacatagttgtaataggcatcgctgccgggaaagttatcggccacgcgctggcgctgaacggcctgcgcatcgcggttttgtaaaaagggcagcatggcggcagaaaaaccgactggtcctttaccctgcgctttccccgtagccacatccactttttccggcggataaccgtttttctcagtgaatgtcgccatcggtttaaaccggttgagcatccgcgctttttgcggatcgctgtcaggcatcatgcctacccacatgtaaacgcggatagcgtcgtagctgctgatcaatgttttttcggcttttagctgccagcctttgtctttctcatagcgcacccagtctgggctaaaacctttcggggcggtttccagcaataaacgttgattggtttcgcgcagcgtggtccacggcgcgccaaagcgggtgaaatactgcgccagcgtcggcggcaggtagctggggttaaaacgccagctgttatcctcagcaaaacccactttgcccggtaacaacatggaacccagcccaggcaccgtcaccacttcctcccgcgcgatacgttttagcaacgcgctgccgatgtcggtataacgctgctctttccacaaacgccccgcctccagcaagctccaggccatccagacatcaccatcggaggcgctattgctgtccagcacttcccacttactgttctctttcttgccccacagccaggcgggcaaacgttcttttaaagaaccctgagcgagattgttctgcgtccagtcgagaatattatcgaaagctgcacggtcgttagccgccagggcagagaacatgccgtaactttgcccttcggaggtggtgattttgcgcgcgtcgctggggtcgatgacgcgcccttcctgactgatgtaatcctttttaaactgctcccaggcaggccaggtacaggctgcctgaacactaaaggcagccagcagcagcatcgtcacgattccactacgcaacacattcatcttcaattactcgttatccgggttaagacgacgacgactaataattcgcagcagacgccacagtacccatgccagcaatatcacactgatagccgccagcaccgccagcagaatcggatggtttgccagcgcataccacacgcgctcgaaccacggcagatgacctacgtaataaacgtcgccaacacgtaggctgttgataccggactcgcggatcaccgcgacgctaccgaacatggtggcgcgtttgccgctatcgttcaccgcatcgttaagcatttcataaccgcgtgggctatctgccaacagcgcaatcacgctgcgctggtcgttatacgggctctggaagccaatcaccgccgccatcgcaccggaagaggtcagcgtactccgggtttctgccgcgcgatcgctctcgtccggcacaatgccggggaacggggtctggcgcatcggtgttttcacccagctttcggtcgcctgcaccaataggtcgatctgcttatcgtctttcagtttgtccgggataccaccgatgatcatgatgtcggcatctttgccctgaatggtgctgccatcatcggtcaccgtcagattaatcgccgggaagcccgtctgtgcgccgataaaaccaacagtattcagcaacgtttccatctgtgcttcgttaggcgctttcggcatcacggtgatggtttggctcagatccgccatccggctgaatgggaagcccgcgttagcaaaggcgcgtagatccggcatcgggatgaagtggtaatacttgctgaagtcgatggtggagtcgtcaccaatcaccacatgattctgcaccggctggaaggtaatacagttatccacgctaccgcccggcatcgggttcatatactcaaagtcgaagcgcagctggttggtcgcgcccagtttcagcgccggaatagagacatctgttttgccatccagcaaaccttgtaataccggaatccgcagcagcaggcggttcgcctcctgtttgctgctcaggttgaaggattgcaggaactggttattcaggctgatatccatccggctactgtctttcaccggcggcatggtgtagcggtaattaatatccatatcaatgccggtactgcgcatcaggtagagatccggcggcaggtttaggctaacgttaatcgctgctggctcaagaccgctggattgtaactgttcttcataggttttcagttcgccaaatgtgaccggacgatcggtacgtacccagttcggcgcatcgtacggcttacgcggtagcagcggtttcacttcattcactaccacgctttcaccacggaacagaatgttaccctgagcgatacctttcgctgcctgcaacaggtctttgtcgtcacgaccaaacaccaccagcagtttgacgtaaggattctgcggatggttaatcatctcaatcaccggggcttttaccgccggatgatcgcgcaggaagtccggccgtttgtcgttggttgcaaagacaatggcattgcgatccggcagttggttatagagtaccgggaagttctgcccacgccagccagaacggctaccaaaccagctggcgacaatggcagaggcttgttgcagcccaacatccggcgcacccgcaaagaccatcggcaaggtgttggtgcggttatcgctcgggtcaaagaatggcaccgggaagtgactcaggtcattcttcacattcagggtctgataggtcagatccagtccactgctccgcccaacatccagccaaagcgtggtgctggccggtttttcgcacacgtcctgataatggccgacaaactccagccgtacacggttgaagtcgctaataaacagtgggttaatgggcatttgcgccagcgtttttttacccaactgttctttggtcactggcagcacgcccatcagttcatcattgagataaacctttaactggctctggacaggcagtaagcttgggcttggggtgtattcgaagttgagcatcgccttcgtcaccacttcatcgctgcgcataccaaactcaatgctgccgttcgggttaatgccacgtagcaccatgctgcccggcggcggtgcaatttgcgcaaaggtcagcttcacatcacggctaggaccgttctgcgccacgactggcgcatcagcgccctgcacgcccggcatcacttgccccacctgcggattttgttccgtctgggcggctacagctggctcagcattgatcagtggttgcgttgctggcgtcgcctgcgtcatgaaagaggggaacgcactcatccccatagccactgcacaaatccagaatagttttcttttcatcgcgttatcatcattgttgagccaaagcctgatcgcttggttgtgccgtttcgctccgctccgggcggcgcggaataaagcttacaacccaggaaaccagagaagtcagcacacggaatatgcccttcacgctagaaggcgcaaactccgccagatggcggtagccacggaagccgagcttcagaatatccagcagactttccagcggcttatcttccgggtagctgtcctgccagagcgcccatgtatccgcacgggcaaacgtacactgcacaaaatcgatatgttgctgggtggtgagcggcattaatttcagcccaacttcattacccatcacgcgcgccacctgggtcgggaagacgtattcctgctgaccgcgtttaagcaacagattcactttctgcccttccagaatctgcgcctgaccgttgatcttgatccccaaaccaccgtcggagaaatcctgaacggtacagctgaagaggtgaccatcttcgcgggcaattgccgcgggcatcgtcatctccacgcggtggcttcggcgtacctgtttgctttctacgcttaccgcaactgcgccgccaagaacaatcaggttgtagaacacccacaccatactgacgaccacggtgagcatctcggttggcgggccatagaagtagcgccagatgcctaccgcaacgcccaccaggttgagcaggacaaggaagatgtagggccggctgatcacccagtcgacgtactcttcttccaccagtccacctttggcggtgacgttaaatttgcctttgtgcgggttaatcagcgccaccagcgtcggtggtgcgatataccacgccagcaccgtttcgtagatttcactccagaaagagtggcgatatttgccctggatcttggagttggtcaggctggcatggatcatatgcggcagcacgaatagggcgatcatcaacgctggcgcatagatgatgtaggcatgaagcagcaggaacgccagcggcgcagtcaggaagatcagccgtggaatgccgctcaagaagtggaacatggcgttgacgtaacatagccgctgagcaaacttcagccctttaccggtgagcgggttatcgagacggaagatttgtaccatcccgcgcgcccagcgaatacgctgaccgatatgcgcgctcagactttcggtcgccagccccgccgcctgcggaatacgcatatacgcggaggtatagccacgacggtgcaaccgcagagaagtatgcgcatcttcagtcacggtttcgacagcaatgccgccaatttcatccagcggcttacgacgaatcaccgcacaggaaccgcagaagaaagtggcgtcccacatatcgttgccatcctgcaccagaccatagaacagcgtgccttcgttcggcgttttacggaaacgccccaggttgcgttcaaacgggtccggactgaagaagtggtgcggcgtctgcatcatcgccagctgtttttctttcaggaaccagcccatggtcatttgcaagaagcttcgcgttggtacgtggtcgcagtcgaaaatgctcacgaactcgcctttggcatatttcagcgcattgttgatgttgcctgctttcgcatgttcatgagtggtgcgggcgatatatttcacccccacgttttgcgcaaactggcgaaactcttccctgccgccgtcatcaaggatccagatattcagcttatctttcggccagtcgatacccaggctggcgtaaatggtatttttcaccacgttgagatcttcgttgtaagtcgggacaaagatatccacgctcggccacaggctcatatctttcggcaatggcaccggctgacgattcagcggccatactacctggaagtagccgagcaccagcacaatccacgcgtacgtttcagcgaagagcagaataagcccgcacaccaggctgaccggatcgtcccagttcagcgtagaggtgtaacgccaccagatataacggcaagaaacggtcaggctcagcacaatcaacattagcgcgctgaagcgccccggcatccgccgtacgatcagcgctaccccccacagcagcatcaggaagataaactgcgccagcgggttaaacggctgagtaacgcagattaacgccagaatcaggctgaaggtgacgatgataccgaggatcaaccgccgcgccccggcactcaaatgaccgagctcttttttctcatccagatgctgtgttttatggctaacgcgctcaggcagctcgttcatccattgatggtaacgtccacgaatattttgcagaccactaaatgcccgcctgcgcggtttcggcgtttctttgcggcttgcaccgatcaataaccagcatgtttgaatgagataacggaccgggtccagcggacgcggacggctggcgttgatatgcggatacaggtttttatgttctgcgcgaatacgctgccagcgcgggtgctccagcggaataaaaatccaggccaggatcatccagaaacagccgagcgtcgcgctgaaagcgctcgcaccgtgacgacgataatcgcgataacgcccgataagccgcgcgttgaccggcgggataagcaaccaccgggtcaggatactcatgatgcactcccgactggcgtttacatcaacttgcactcccgactggcgttttcagcccggagtagttcaacaggcaccagttcgccagcgtcagtatctcttcagccgccagcgcatcactgcgatattcacctactggttgcttagccgccaggcattcagccatcgcttcatcacgatgaatgagcatcggcagtaatcggcgctggctttgcaaccaaagctggtaaatatcgtcctgaacctgactgccaatacggaagtcattaatcaaaatatgtgcgccatccggcagcgcttgctgatgcagtcggatatggcagttggcatccacattgacgattgccaggctgtgatcgcacaaactcagcagctggtgggttatctggctggcatcacgcggtaagtcgattaaaatccactggtaacgcccgctggcttttagttgctgtaagccggagcaaatatcgctcagccgggtttgccagtgctgtggattttcttgttcttcaatggataactgaccaaaaggcagcaaatcgagctggctggtgtagcgcaacccagcgtcacgccagtcctggccatccagcatcgctctggcccagccctgacggtgggtaaaatcaacattaaaactcaggcgcaacaagttgtccgggcaggcatcgaccaccaggacattttctcccaacatttgtaaactccaggctaatgcggcggtgatggttgttgtccccacgcctccccgcaccccctgctatcccagtacggccattcaccaatcccttacttttgttgcgcaaactctgccagcaacggccagcgttttaatgccgcggccaactgttcgcgttgggaaatatcggcataatcaatatcaggcagactaaatgcctgctttaacgccacaatatcattctggaagatatagcctatcgcgggatcaggcagagtatctggttcattgttattcattttgcttgatccctatgaaataaccgtaccgttcatgagacaattctaaccgtgagcatttcgccggtttattgtttacggcgagacgggaatttgctcactttttgactttccgttacgcaacagaaaaagttaaaaacgaaaagactaaaatcacacgtcttgtgaccttctaaattgattcacatgctaaatctgataagttttaatttcaatggtaggtttatttcttagctttcgctagtaaactgataatcagacaaaatggtgacatgagggacattgtggaccctgtattctctatcggtatcagtagtttatgggatgagctgcgacatatgccagcaggcggcgtctggtggtttaacgtcgatcgccatgaagatgctatcagtctggcgaatcaaacaattgcatcccaggctgaaaccgcacacgtcgcggtcattagcatggacagcgatccggcgaaaatctttcaattagatgattctcaagggccggaaaaaataaaattatttagtatgctaaatcatgaaaaaggtctatactatttgacccgtgatttgcagtgttctattgatccccataattacctttttattcttgtttgcgcaaataacgcatggcaaaacattcctgccgagcggcttcgcagttggttggataaaatgaataaatggagcaggttaaaccattgtagccttttggtaattaatcccggaaataataacgataaacaatttagtttgttgcttgaggaataccgtagtctttttggtcttgccagtttgcgttttcagggtgaccaacatttgctggatattgccttctggtgcaacgaaaaaggggtcagcgcccgtcagcagcttagcgttcagcaacaaaatggtatctggacattagttcaaagcgaagaggcggagatccaaccacgcagcgacgaaaaacgcattctgagtaatgttgctgtactggaaggtgcgccgccgctaagcgaacactggcaactgttcaacaataacgaagtcctgttcaatgaagcccgtaccgctcaggcggcgacggtggtcttttctttacagcaaaatgcgcaaatcgagccactggcccgcagcattcataccctgcgtcgccagcgcggtagtgcgatgaaaatcctcgtgcgggaaaataccgctagcctgcgcgccaccgatgaacgtttgttattggcctgcggtgcaaatatggttattccgtggaatgcgccactctcccgttgtctgacgatgatcgaaagcgtgcaagggcagaagtttagtcgctatgtgccggaagatatcactaccttgctgagtatgacccagccgctcaaactgcgtggtttccagaagtgggatgtgttctgtaatgccgtcaacaacatgatgaataaccctctattacctgcccacggtaaaggcgttctggttgccctacgtccggtaccgggtatccgcgttgaacaagccctgacgctgtgtcgccctaaccgtaccggcgatatcatgaccattggcggtaatcggctggtgctgtttctcagtttctgtcggattaacgatctggataccgcgttgaatcatattttcccattgcctactggcgacattttcagtaaccgtatggtctggtttgaagatgatcaaatcagtgccgagctggtgcagatgcgcttgcttgccccagaacaatggggcatgccgctgcctttaacgcaaagttctaaaccggtcatcaatgccgagcacgatggtcgccactggcgacgaataccagaacccatgcgactgttagatgatgctgtggagcgcagtagttgatataagatgctgtggagcgctcatcatgatgaccatcagcgatatcattgaaattattgtcgtttgcgcactgatatttttcccgctgggctatctggcgcggcactctttgcgacgcattcgcgacaccttacgtttgttctttgctaaacctcgttatgttaaaccggccgggacgttacgccgcacggaaaaagccagggcaaccaaaaaatgactcaatttacgcaaaataccgccatgccttcttccctctggcaatactggcgcggcctttccggctggaacttctattttctggttaagttcggcctgttgtgggcgggatatcttaacttccatccgctcctcaatttggtgtttgccgcgtttctgctgatgccccttccgcgctacagcctgcatcgcttgcgccactggattaccctgccgatcggctttgctttgttctggcatgacacctggttgcctggcccggaaagcataatgagccagggtagccaggtggcggggttcagtaccgattatttaatcgaccttgtcacacgctttattaactggcagatgattggggccatttttgttttattagtggcctggttattcctgagtcaatggattcgcattaccgtttttgtggttgccatactgctatggctgaacgtacttaccctggcgggaccaagtttctccttgtggccagccggacaaccgacgaccactgtaacaacgacgggtggtaacgcagcggcaaccgttgcggcgacgggtggcgcaccggtagtgggtgatatgcccgcacaaactgcaccgccaacaacggcgaaccttaacgcctggctgaataatttctataacgcggaggcgaaacgtaaaagcaccttcccgtctagcctgcccgctgatgctcagccatttgaactactggtgattaacatctgtagcctttcctggagcgatatagaagccgccgggttgatgagccatccactgtggagccatttcgatattgagttcaagaactttaactccgccacctcctacagtggcccggcggcgatccgtttactgcgcgccagctgcgggcagactagccacactaatctgtatcaaccggcaaataacgactgctatctgtttgataaccttagcaaactgggctttacccagcacctgatgatgggacataacggccagttcggcggttttttgaaagaagttcgcgaaaatggcggcatgcagagcgaattgatggatcaaacaaatctgccggttattttgctgggctttgatggtagcccggtttatgacgataccgctgtgcttaaccgctggctggacgttaccgaaaaagataaaaacagccgtagtgccacgttctacaacacgcttccactgcatgacggcaaccattatccgggggtcagcaaaacagcggattacaaagcgcgggcgcagaaattctttgatgaactggacgccttctttactgaacttgagaaaagcggtcgtaaagtgatggtggtcgtggtgccggaacacggcggcgcgctgaagggcgacagaatgcaggtatctggcctacgtgatatccctagcccgtctatcaccgacgtccccgttggggtgaaattcttcggcatgaaggcaccgcatcagggggcaccgattgtcatcgaacaaccgagcagcttcctggctatctccgatctggtggttcgcgttctcgatggcaagattttcaccgaagacaatgttgactggaaaaaactcaccagtgggttgccacaaacagcaccggtctccgagaacagtaatgcagtagttattcaataccaggataaaccgtacgttcgcctgaacggcggcgactgggtgccttacccgcagtaagaacgaaaaaggccgcagagtttcccccctgcggcctggtccgggcgcaaattgccattacggcagcctgacgcccgcatgacacgttacttccgcttgttcagccagttcacgatcatactggcaagaatgccagcaatgaccggagccgctaaatcatgccagaaggccatgcccagctctgcgaacgtcatatagccgcctgtgttgtaatgacaacgtttcgcggctattcttgagtggtctagagtcaagattagcccccgtggtgttgtcaggtgcatacctgcaacgtgcgggggttttctctctccagcaaccaatgccaccagggataaagcccccgcaacattgcgcctcaccggaacctttccggcttgccgctgattctacgattgctttttactgtcagcacccggcaatcttcctcattgcgcgatgccttccagcttaatttctttatttgcaatagttgcagttcatatccgggctgactccagactggtagtgaaatgcgcaattttgtagaattgcgcctcctcgcgacctccccagtgaatctgttgcctcattttttacatactgcgtattcgacttctccacctgttgcgcaagagaaactgggtttattcatttttgcgaggccgacttctttctggacaggactttatgcagcacaacacactaagcaaacacaatcagaaattgccgtttacacgctacgacttcggctgggttttattatgcataggcatggcgattggtgccggaaccgtgctgatgccagtacaaattggcttgaagggaatttgggtatttattaccgcagcgatcattgcttatcctgccacctgggtagtgcaggacatttatttaaaaaccctttctgaaagcgattcctgtaatgactacaccgatattatcagtcattacctggggaagaactggggaattttcctcggggttatctactttttgatgattatccacgggatttttatctactctctctccgtggttttcgacagcgccagctacctgaaaaccttcggtttaaccgatgccgatcttagtcaatctctactttataaagtcgctattttcgccgtactggtggcgattgcgtctggtggtgaacgattactgtttaagatttccgggccaatggtggtggtcaaagtagggattattgtcgtgttcggttttgcgatgatcccgcactggaatttcgccaatataaccgccttcccgcaagcctccgtctttttccgcgatgtcttgcttaccattccattttgcttcttttctgcagtatttattcaggtacttaacccaatgaatattgcctatcgtaaacgggaagcggataaagtactggcaacccggctcgcgctgcgtacccaccgaattagttatatcacgctcatcgcggtgatcctgttttttgcctttagctttaccttcagtattagccacgaagaagccgtttctgcctttgaacaaaatatcagtgcactggcgctggccgcgcaggtgatccctgggcatatcattcatatcacctctacggtgcttaatatctttgccgtactgaccgcattctttggcatttatctcggtttccacgaggccattaaaggcattattctcaatctgttaagccgaattattgataccaagaaaattaacagtcgcgtgctgactctggcgatctgcgcttttatcgtcattacgttgacgatttgggttagctttcgtgtaagcgtgctggtgttctttcagttgggaagcccgttatatggtattgtgagctgcctcattccgtttttcctgatctataaagtcgcacaactggaaaaacttcgcggatttaaagcctggctgattctgctgtacggcattttgctatgcttgagcccactgttgaagctgattgagtaaaccggagcgcatggccccggttttgtgagttaacgctgcggattttcatcctgatcaacagcaaaacaagctaccagttgaccgccgtagtcttttagctgcggctgcaactgggtgcaggggccgaagcgccgacgacagcgggcgttgaaggcgcaacccggcggtggattcagtgggcttggtagttcaccgctgagcttgatgcgctcgcggcgatcgtccgggttcaggcgcggcgtcgcggaaagtagcgcctgagtgtacggatggcgcgggttattgaagatttggtctttcgttcccttctccacgcagcggcccaggtacatcaccatcacttcatcagcaatgtgctccaccacgctcaggtcgtgggagataaagacataagacagccccaactcctgctgcaaatccatcatcagattcagcacctgcgcgcgcacactaacatccagcgcggaaaccggttcatcggcaatcaccacatccgggtcgagcatcagaccacgggcgatggcgatacgctgacgctgaccgccggagaacatatgcggatagcggtcatagtgctcggttttcaggccgactttcgccatcatgctcagggctttttcccgacgctgttctttgcttaagctggtgttgatcagcagcggctcttcaagaatttgcccgacttttttacgcggattcaggctaccgtaagggttctggaagacgatctggattttctgccgacgcagcttctgcgcctgcggatcgtgcttaagcagatcctgcccctggtaatacagctcgccaccggtgggcatttcaatcatcgtcagcaaccgaccgagggtgcttttaccgcagccagattcgcccactactgccagcgttttgccacgttcaaggttaaagctaacgccatccagcgctttaaccagacgttccggcgcgaacatgcctttcttcaccggataatgttttttcaggtcgatagcctgcaacagcggttgttgcagggtggcctcttgcgtactcatagtgtcggcctcccggcatcatcaagtgggtaatggcatttggactgacgcccgtcagcgagcatattcagcgccggttcttcagcgcgacatctgtcagtggcataggggcagcgcgggttaagcaggcagccgttcgggcggtcgtacttgccgggaacgacacctggcaagctcgccagacgttctttgtcctgagcaaattctggcagcgcacgcagcaatgcctgagtatacgggtgacgcggcgcatggaagatggcgtgcgcatcaccggtttccaccacctggcctgcatacatcacgatgattttatgtgccgcttccgccaccagcgccaggtcatgggtaattaacaccagcgccatgttctctttctgctgtagctccagcagtagttcgatgatttgcgcctgaatggtcacgtccagcgcggtggtcggttcatcggcaatcagcagttttggccgacaggcaatcgccatggcgatcatcacgcgctggctcatgccgccggaaagctgatgcgggtaaacatccagacggcttgccggatcgggaataccgacctgattcagcaggtcaatcgctcgctgacggcgggtacttttgttgccgccctgatgcaccttaatcgcttccataatctggaaacccacggtgtagcacgggttaaggctggtcatcgggtcctggaagatcatcgccacttcggcacccaccaggttgcggcgctctttttcactgatacgctgcaaatcctggccgttaaactccagtttttctgccattacgcggcccggataatcaatcagccccataatcgccagactactgacgctcttaccggagccggactcacccacaatcccgaccacttcgccctgttttacgctgtagctgatgcggtctacggcgcggaacggcgcgctttcgtcgccgaaatgcacgcttaatttatctacatttaataacgccatctcgaacctcttactgcttcagtttgggatcgagcgcgtcacgcagaccgtcacccatcaggttaaatgccagcaccgtcagcaggatcgccagacccgggaaggtcacgacccaccaggcgctttgcgcgaactgcaacacgtcggagagcatggtgccccactcaggcgttggcggctgtgcccccatgccgaggaaaccaagagcagccatatcgagaatggcgttagagaaaccgaggctcgcctgaacaatcagcggcgcaaggcagttcgggaagatgttaataaacatctgacgcatcgccccggcacccgccacgcgagacgcggtgacgtaatcgcggttaacttccaccagcacggcggcgcgggttaagcgcacatagtgcggcaaggcaacgaaggtcagtgccagcgcggcgttaccaatgctcgggccgaaaattgccaccagcaccagcgccagcagcagacttggcagcgccagcatgatatcgaccacgcgcataatgatgttatcgaccaggccgccaaagtaaccggcgatcaggccgagaataacgcccataatcaggcttaacacaattaccagacagccaaccagcaggctcaggcgcgcaccgtacatcaggcggctcagcacatcacggcctacgtcatcggtgcccagcaagtgcgccatgctgccgccttcctgccaggctggcggggcgagcagtgcatcgcggaactgttccgccgggttatagggtgcaatccagttggcaaagatcgcgatgaacagcacgatgacgacgtaaaccagcccgacgaccgcgcctttgttgcgtttaaaatagtgccagaactcctgtaacggggtcatcggcaccggtgcgctaatcactttattttcagtaacctgactcatgatgtccccttacttcttatgacgaatacgcgggttcaccacgccgtacagcagatcgaccagcaagttgacgaggataatcatcgtcgccaccagcaatacgccgccctgcactaccggatagtcgcggcgttgcagtgcgtcaatcaaccagcgtcccagaccgggccagctgaagatggtttcggtcagaatcgcccccgccagcaatgttcccacctgcaggccgataacggtcaccaccggcagcatcgcgttacgcagcgcatggacgataatcacccgcatgcgggttagccctttggcgcgcgcggtgcggatgtaatcctcgcccagcacttccagcatgctggagcgtgtcatacgcacaatgaccgccagcggaatagtacccagcacaatggcaggcaagatcatatgggcgacggcatcgataaagttgccgtcttcaccccagatggcggtgtcgattagcataaaaccggttaacggattggagtcatcgaggaacaccatatcgctcacgcgaccggagacgggcgtcaggttccagtgcacgctaaccagcatgatcagcatcatgccccaccagaagataggcatactataacctgtcagcgccaggccaaccgctgtgtgatcgaaaatggaaccgcgtttaaccgcagccagcacgccgaccggaataccgactgccgtagcaaaaatcatcgcgcagacgccaagttccagcgtggcctggaagcgcggcacgaactcttcccaaaccgggatgcggcttttcatactaatgcctagatcgccatgcataacgccccaaatgtaatggagatactgctgccacatcggtttatctaagccgagttcagccagcagctgcgcgtgacgctctggggagatcccacgttcgcccgccatgatcatcaccggatcgcccgggatcatgtggacaaaggcaaatgtgagaagggtaataccgataaacgtggggatgacgagtcccaaacgtcggagaataaactgcaacataacccggattctctatagtgacccgcagcctggaactgcgtgtctgtattgctcacaaatcaattcccgcccttatcggacagggaatgaagtattgctgccggatggcgctgcacgcagaggcacagcgccaccgggtatacagattgttgacaaagtgcgctttgtttatgccggatgcggcgttaacgccttatccggcctacaaaatcgtgcaaattcaatacattgcagaattttcgtaggcctgataagcggagcgcatcaggcatttttgcctttgccatcagtcttgtatggcttttaattattcgatagagacgttttcgaagtgatgtttgcctaatggatcaaccacatagcctttaacttctttacgtaccggttcaaacacggtggagtgagcgatgatcagtgccggagcctgatcgtgcatcaccacctgcgcttgtttgtacagttcaacgcgtttattgtggtcgtcggtagcacgcgccggttgaatcagatcttcaaacggtttgtagcaccatttactgtagttggagccttgttcagaggcggcgcagctgaacaggatggcgaagaagttatccggatccccgttatcgccagtccagcccatcattaccgtctggtgctcgccatctttcgcacgcttgaggtactcaccccattcgtaggtgacaattttggcctgcacgccgactttcgcccagtctgcctgaatcatctccgccatgcggcgagcgttcgggttatacggacgttgtaccggcatcgcccacaggtcgatggagaaacctttttccagacccgcttctttcagcaaggctttcgctttttcaggatcgtaggtgtagtcctgaacgtcgtcgttatagccccacatggttggcgggatcaggtttttcgcacttacgcccgcgccctgataaaccgctttgatgatcgcgtctttgttcaccgcgtaggtcagagcctggcgaactttcacgtcatcgagtggttttttctgcacgttatagctgagataaccgacgttcagccccggcatttccatcagattgatggatttatcctgcttcatgcgagcgatatctgccgggttcgggtacggcatcacctggcattcattcttctgcaatttcgcgtaacgcacggaagcgtcaggggtaatagagaaaaccagcgtatcgatctgcggtttggtgccccagtagccatcaaacgctttgtagcggatacgggaatctttttgatactgctgtaactggaacggaccggttccgattgggttgaggtccagtttttccggtgtaccggctttcatcatcgcatcagcatattctttactcagaatagaggcgaagtccattgccaggtcagcgaggaacggcgcttccgggcgagtcagcacaaactgaacggtgttgtcgtccacctttttcacttcactgatcagctctggcaagcccatgccttcgaagtattcgtagctgccgccagaaactttatggtacgggttttgcgcgtttttctgacgatcgaagctgaacaccacatcatcggcgttcagttcacgcgtcggtttgaattctttattgtcgtgccacttcacacctttacgcagatggaaggtataggttttaccgtcttcgctgacttcccacttttcagcgaggcccgggatcacttcggtggtgccgattttaaattcaaccagacggttataaagcgggacggaagaggcgtcataggtggtgccggaggtaaacagctgcgggttaaacccttccggagatccttcactgcaataaaccagagttttagcctgaacacttgctgcgacggtcatagccaccaggctgagaccaagcttcagcatcccactctttttcaaggaaatacgcattattctgctccaattgtgatgtttgttgttttaaccctttgcagtgggttgtcgctgcctgaccttttttgttttttgcccggtcgggtcaacgttatgaggtggggatgccgtactaattaacatcagtgtaacagtgcggatcctccataaaatgcccctcgtgacctacaatctgtcaacagaatgtgaaaacgtcaatacagccaaccgggatttacaccaacggtgagaatccacacacaaagattaaaaaaacttcaaacagctatttgcagcagagaaatttgtgctactccaacatgaccagaacaatcagcttaatatttagcaacatttggtgattaagttttatgcatttaatgaaaaaaatctgaggaaaaggtggatatctgagcgattaataccatgaacgctaaaacgcacagcggaaaatgccagggccagccataagtaacgcaaaaaaagatttaagcaaatataaaaaaagacaatggtttctgtcacaaatccgttaatggatagtgagatatggggcgcaaatttggcagggaaatgtgtgtcgtgtaggtcgaataaggcggtcgcgccgcatccgacaatggccggcacatttgcctgatgcgacgctgacgcgtcttatcaggcctacgtcgagtcgaacctccctgcccccggaggttctcatcctcatgagctgcagatgcaaaaaagcctgctcgttgagcaggcttttcgaatttggtcggtgatagaggattactcgccacttcgtggctcgccctgcgggccgttgctggcgcaacgttctctcgcttcgctcgagtcgaacctccctgcccccggaggttctcatcctcatgagctgcagatgcaaaaaagcctgctcgttgagcaggcttttcgaatttggtcggtgatagaggattcgaacctccgaccccttcgtcccgaacgaagtgcgctaccaggctgcgccaatcaccgaatgcggggcgcatcttactgcgcagatacgccctcgtcaatcccttaatagcaaaatgccttttgatcggcgagaaagtcagcaggccgcttagttagccgctgcctcttttgcctgcgggatgtgacaccagttgttgttttcgttaattccaccatccggactagtatagccaagacaacccatgatggtatcgtacagctctacgtgacggcgtggcactttcatgtcggcttcttttttcagctgcgcaaacgcctgcgcattggccggattttccagatatttatcactcatccagaccatcatcggtacgcggaactgctccggcggtgccagttcacgcggcgtgccgtgcaggtgctcgcgttcattaatactctcaccgtggtcagctgcgtagaacacaatcgctttcttatcgcgaacctgatcaatcacgctggagataaagtgatccacataggtcacgctgttgtcataggagttgatcatctgcgctttggtacagccgctatcaacaccaatacattccggcttccactgcgcgaagctacgcggataacgctgggtgtagttaaaatggctacctttggtatgcagaatgatcagatgcttaccatccgggttgcgccctaggctttgctgcatttcgtctaccagcaacatatcatctaccggcttgccacgattacgtggctccgcaccaatctgctcacgataagcaatgttgtccgccatcgtgttgctgtagaaccacatttcgctctgcatagcgtagaggtcagaactgaatcctaactgcttcagaaccgcgaaaatgttctgttcttttaatgtgcgctgcggattatcttccgcgcccccctgacgtacaaacatgcaacgcagactgagtttggttgcggtatcacaggagtaaccacggaacgccgccagatttttctcctgggccagtttcggcgtggtattacgctcatagccgaaaatacccatatggtcccaacgcgtggtttcaccgatgataaacacgacataagtgtcatcaacgttttgcggtgcctgataagtgaatttcttcgccggattaagcaaactattattatcggaagattcatcgacccgcgcccaggcatacagccccaacgcagaaagccagttacttggcagataagagttcgctacgacaccgccataactcggcaaatcaacgccggtcgccctctccactttcttctgctggatatccagcaaacgaatcggtgcccaaaccataatacccgccagtacgacgaccgccaggctgcgaatacgctgccctggggttcgcagttgtcggagcaaggtgtagcgacagcggttattccagataaggataagaggcaatgcactaacggcgattaaccagagaataaagttcagaccaacaacttctttactcaggtcgatatcggtggtcatgacggaagcgatgatgccataaccaatgaccacattaaggaaggtcatgtaatagctggcacctgcggaaaagagcaccaccaggcttgccagaatacgccagctgcggcggccaaacaggctaagaagacgtagtaaaaagaaggtcaccagtacggtggcggccagttcaacaacagcagaaatgcctttccagacggtaaaatcgtgcgcatagctgccgaagcggcggtaaaaaaccgcgccattcataaaaaggccaatatagattgcaagcaaaaagctcagcttctgctgtgtaatgcttttgatgtatctcatgcaaacaaaccctggacaaacaggtgataacaccctgcttagtggcttttcaggcccggcagggaaaaagtgcggaggtagtcagataagtaaaatctacacgcgcgaataagtagaccacagcaaagggaaaaagtgtggggaaagagtgtgcatgaagcacaaatttacaaaaatgcaagtttgaaaagagactttagcgttacaaaaagcagtaaaaagggccagttaattggcccaaattttacgagtcattgtttatacatttcgttgatgcgtttgatgcacacggaagctgaagcccagtagctcgcggctgagcattaaagggagccatgcgcctcacgcaacattttctgctctggctgacgaatcgtcgtagaaagcgccaaactcagaatcagcagggcgaaaatcacgtagaaggtcacatagaagccgccaaacagactggcgataatgctaccacaaatgctaccgataccgaaaccgagataaatcacaccgtagtttttcgccaggttattgaggccaaagaactcactgaccagactcggaaagacggtaatagtgccgccaaagttaaatgccacgcaggcaatcgctgcaaagaacgtcactgcattcaatggtgcaaacagcagggccgccatacccaccaggcttatcacctgaccaatggtaataacacggatacgggcgattttgtcagacagaatacccagcaccagacgaccactaaggttggcgatggaaataacagtgactgcattggctgcggaaaccacatcaaggtgtgccagactttgggcgatatctttcgctaccccaatcacgtacaggccgctcatgcaggcggtcaggaacattaccgctaacatccagtactgcggtttacgcatgctctctgccagcgtgtaatctttctccaccacaccattgctggttttcacttcctgttttggtgcgtctttcattaacgttgcgccgaaaacaatcatcaacagcgcaatcgctccccaaatcacaaaggttttttccagaccgaccgtttccagcagctgcgtgtcgataaatttgaaacccaggctacccagaccataagaaccgatagcgaacgcggagatcagacctttacgctccgggaaccacttcacacagttagagagcgtcagcagataacccgcgccatctgccagtcccaccagcacaccggcgcttaaccacagcatcatcaggttgtcagaatgcgctgtcaggaagaagcctaatcccagcaaaatgccggaagccatggtgacgcgtttaacgccaaaacgttcctgtaatttgcccgcaacagaagagctaattgccagccccagacttaacaagccgaaagagaaagcgacctggcttaccggcgcatccagcttggcggaaagcgcgccattaaacaggctccaggtataaacgctccccagcgcaaactgggtaatgatagtaccgatgagtgtcagccagcgggtacgctgataattactaggtgtcatggcagtattcctgcagtaataaaaaggaaaaatctctgccgacaaccataacgaagtgcactttatgcctggggaaaaacggcatgaaatgccatcagaacggaatgaaatgccttagttcaggaatgaatgacgcgacaattattcaccaaatttattatttggtaagttagcacccactatcgccacaactattgttatttaatggtttcaattgtgactgttacgttaaaatctggcgctaacccccatcgtatacagatagtcgctattattagtggtattttctgcctgagttagcgcggcataggcggcaatattttgattgagcaacatatcagcgcctacggtgacatccagccagttgccgttctggtttgtcgccgtcatccggctcaggccactttgcgccttccagatattctcgccaaattgctggttatagctgatttgcgcccagggtcggagatcgccaagccgggagtcaacacgccagcctaaggtactcacgctggcatgccataacggatcggtcagcgtggtagtactgtcgccaaactcgttatacatgctggtggttgtgccatcgtaatgtaatgccgcgaccgggccggttgtaacctgttcatataaaggaaaattccagcccatactcatactgctggtcacatccacaggggtttcttccgccagattgacttccagtcccagcgccctttggctactttgaatacgttggctcaaaatatcgttgtaatcaggttgatgatcactatcccaggtgtaacgctctgtggaaagtccgggttgcgtatcaacgatatattcttgttgccaggcgtaagctgtgttgagaaaaaaggcactgattaccacgctcgccagcaggcttagctgccagcgaccaccgcttttttttatgatcattaacacgactccagggaagagccgaattcggcaatattattgtcattgtatgaaggatatcgggcatagtagccctgtattaaatattgactttttcaccgatgcgtcaagaaaagcggctgaaatttttacgatcgggtacatagcgagggaaagtatggaacgttgcggctgggtgagtcaggacccgctttatattgcctaccatgataatgagtggggcgtgcctgaaactgacagtaaaaaactgttcgaaatgatctgccttgaagggcagcaggctggattaagctggatcaccgtcctcaaaaaacgcgaaaactatcgcgcctgctttcatcagttcgatccggtgaaggtcgcagcaatgcaggaagaggatgtcgaaagactggtacaggacgccgggattatccgccatcgagggaaaattcaggcaattattggtaatgcgcgggcgtacctgcaaatggaacagaacggcgaaccgtttgtcgactttgtctggagctttgtaaatcatcagccacaggtgacacaagccacaacgttgagcgaaattcccacatctacgtccgcctccgacgccctatctaaggcactgaaaaaacgtggttttaagtttgtcggcaccacaatctgttactcctttatgcaggcatgtgggctggtgaatgatcatgtggttggctgctgttgctatccgggaaataaaccatgattcgggaagcgcaacgtagtgaactccccgcgatcctcgaactgtggctggaaagtacaacctgggggcatccctttataaaagcgaattactggcgtgactgcattccgctggtgcgggatgcctatcttgccaacgcgcaaaactgggtctgggaagaagacggtaagcttctcggttttgtcagcattatggaaggccgatttctggcagcgatgtttgtcgcaccgaaggccgtcaggcgcggtattggtaaggcgctgatgcagtatgtgcagcagcgccatccccacctgatgctggaggtttatcaaaaaaatcaaccggcgataaatttttaccaggcacagggttttcacattgtcgattgcgcatggcaggatgaaacccaactacccacatggattatgagctggccggtggttcaaacgctgtaattaactgctggccggtggttcaaacgctgtaagtgtcagttccggaccgttgtatttttccagccatgccagcgccgtattacccgcacagccattccccagccggctgctggggagatctttggtcagcacgttcactgcgccgtttttacaaataccgtcagcggttaaatccagatccggccatgccccttcgtgaatgcaaatcacgccaggtttaattccctcgctaatgaccgctccggcaagaatttgcccgcgtgcgttccacaaccgaacagtatcgccatcttgtatgccgcgctcctgggcatcgtcaggatgaatggtgacaggctcacgatttgccaccgcgtacaattcgcgcagagaactgtaattcagctggctgtgcaggcggtgcgccggatgggcagaaagtacctgcaactgttctggttcggcattgccctgccattcgtccggctccagccacattggatgcccagggcaatccgggtaaccgtaatcggcaatacgctgactgaagatttcaatcttgccgctggcggtttttaacggatgcgccagcggatcgcggcaaaaatcagcgaagcgaataaaccgctcgctgtccgggttttccggcatctcaattaactggttggcttgccagaactcagcaaatggcggcaattcaacctgctggcttgccccgcgctgtcgggcaacgttataaaacgtttccagccattgcagctcactttttccttccgtaaaacgtgcataaccgcccttctcccagcgttcacttaactcggcaaaaacatcaaaatcattacgcgcttcatagcgtggcggcaccacttgcttcatcggcaccagatgctgattactgtaatcaccggtcatggtgagatcattacgctcaaaagaggtagtcgcaggcagaacgatatccgcgtgttttgccgccgccgtccagaagcattcagagatcaccaccagctccggtttttgccaggcacggatcaggcgattggtatcctgatgatgagtaaagttggcaccgcccgcccaccagataaaacgaatatccgggaaatgtcggttcataccgttgtgttgatatgcgccaccagggttttccagtgcttcaacaatgcgggcaacagggattttatccaccgcatcgcagccacccggcaagctgccctgcatggaagagagcaccgcagaacgccgcgtggggttaccaccattggcaaaatggtaagaaagaccaaaaccgccgccgggtgtgccgatttgccccaacattgctgccagcgtgacgatcatccagtgtttttgctcaccaaactgttggcgctgcattccccagcctgccatcagcatggtggtattttggtggaaaatagccgccagctcgcggattttcgctgcgccaacaccacaaatctctgctgcccattcggcggttttcgctattccgtcactctcgcccagcaaataagaggcgaagacggcataacctgtggtgcaacgcgccagaaacgcttcgtcgtgccaaccattttccaccagcgtatgggcgatccccagcatcagcgcaacatcggtgcccatgtgcggtgccacccactccattttatcgccaaagaaatcgacggtttcgcttcgcattggatcaatgcagatcagctttttcccgctgtcacgcagtgcagaaaagtaagaaagcccctgctcatcggatgcattccacgcaattttcagcgtattgagtgggttagcactccacagcaccacgacatcgctatgttccagcaccagcggccaactggtctgctgttgataaacttcactaccacccacgacatacggcatgatcgcctgtgccgcgccggtgctataatcccccagatgcccggtataaccgcctgccagcgccatatagcgttgtaataatgtgctggccttatgcagcacgccgttactacgccagccgtaggaaccagcaaaaatgcttgccggaccataagcctcacgaatgcgtttatgttgttggtgaataagatccagcgcctcatcccaactcacgcgaacaaattcatcctgcccacgaatgccttgcgggttttccggactcgcaagaaagccttttcgcaccattggaaatcgtacccgcgtattgctgtgaacctggtcgcgaaccgcgctctgcaaggagttttccattcctgtggctaacgcgccacggctgctaaacacggtttcgccgtcggtttcaaccagcatgggcccccaatgggcggcagtcagaacggaatatcgtgaggatgagttggccaaaccgaagactcctgaaaggttagatgtattgagcagttaaatattacttacaaatttccgagtattcccaggaataatcttcatgttcacgcggcataatctcccgccacggaacccgtggcaaagaataaaaaggttattaaggattaacaatgaagaaacgtgtttatcttattgccgccgtagtgagtggcgctctggcggtatctggctgcacaactaacccttacaccggcgaacgcgaagcaggtaaatctgctatcggcgcaggtctgggctctctcgtgggcgcgggtattggtgcgctctcttctagcaagaaagatcgcggtaaaggcgcgctgattggcgcagcagcaggcgcagctctgggcggcggcgttggttattacatggatgtgcaggaagcgaagctgcgcgacaaaatgcgcggcactggtgttagcgtaacccgcagcggggataacattatcctcaatatgccgaacaatgtgaccttcgacagcagcagcgcgaccctgaaaccggcgggcgctaacaccctgaccggcgtggcaatggtactgaaagagtatccgaaaacggcggttaacgtgattggttataccgacagcacgggtggtcacgacctgaacatgcgtctctcccagcaacgtgcggattccgttgccagcgcgttgatcacccagggcgtggacgccagccgcatccgtactcagggccttggcccggctaacccaatcgccagcaacagcaccgcagaaggtaaggcgcaaaaccgccgtgtagaaattaccttaagcccgctgtaatccctttcatgccaggtgatgcagaaatcacctggcattcttcagttttccttcatcatatttcaggctaaggtgatcgccttatcagtgaatggagagaagcatgaagccgtccgttatcctctacaaagccttacctgatgatttactgcaacgcctgcaagagcatttcaccgttcaccaggtggcaaacctcagcccacaaaccgtcgaacaaaatgcagcaatttttgccgaagctgaaggtttactgggtagtaacgagaatgtaaatgccgcattgctggaaaaaatgccgaaactgcgtgccacaagtacgatctccgtcggctatgacaattttgatgtcgatgcgcttaccgcccgaaaaattctgctgatgcacacgccaaccgtattaacagaaaccgtcgccgatacgctgatggcgctggtgttgtctaccgctcgtcgggttgtggaggtagcagaacgggtaaaagcaggcgaatggaccgcgagcataggcccggactggtacggcactgacgttcaccataaaacactgggcattgtcgggatgggacggatcggcatggcgctggcacaacgtgcgcactttggcttcaacatgcccatcctctataacgcgcgccgccaccataaagaagcagaagaacgcttcaacgcccgctactgcgatttggatactctgttacaagagagtgatttcgtttgcctgatcctgccgttaactgatgagacgcatcatctgtttggcgcagaacaattcgccaaaatgaaatcctccgccattttcattaatgccggatgtggcccggtggttgacgaaaatgcactgatcgcagcattgcagaaaggcgaaattcacgctgccgggctggatgtcttcgaacaagagccactgtccgtagatagcccgttgctcagtatggccaacgtcgtcgcagtaccgcatattggatctgccacccatgagacgcgttatggcatggccgcctgtgccgtggataatttgattgatgcgttacaaggaaaggttgagaagaactgtgtgaatccgcacgtcgcggactaagccgcgactgcgtagagtaaagcccgataatcgctcgggcttttactctttattgggttgcagtaactgctgtagtccaggcctgattaaacgcctgatgctgtgccggtaatggcgcaatcagtttgttatattcacttgcctgctgactagtcgggaactggatgccatttgcgacaaagctcacctgagtaccttgctgagcaatgtagtctccaaccatcaccagttgttgcgtgaaagtttgtgccgccggaatcaacggttgcaatgcatcagctggcgtcgttaccactttggtgaatgcctgatcaaagaccggtttcaaatcatcgctctgttttagcgcagagtgcgcagcatcggcctgcaacttcgcattttgcagttgttgcgccagcacacccaggctaccgttcatttcacgcagcggaccgctttgcgtaacgtaatcctgcggtacgcgaattgcgttaacgctgtctacaaccgggcgcagaccggaatccatcgcctgattcacctgctgagaataaccatacagaatcgcgtaatcagagacaaaaggaccaaactgttttttctgatcggcagtcagggttggtagacgttcaccgctacgcatcactgtattctgcaggaagtcgataaacgctttacgctgatcgccttctttatcaaaacacccactcaggctaactaccattaataacgccgcaagaggcgcaaaccagcgagagcaggactttcctgtcgccattttcttactcctttcacccaaaaaaagcgcacaacgacacacgcgtgtctgacgtgacaaggatagtccaggacaggcttgcaggataccctttctacgtaatcttcctggtaaaatcatggagaaaatgaaacaaggttaatttgttgtttcattgttaaaaaatgatagtgccgttgccttttttgtagccagagatttacgccttcgcagaaggttagattttcgaaatctttacaaaacaggagtggtaagagatatatcggcatttatcagatcgttaggtggctataagtcacgctaaatgacaggctgaatcgaatcatagccagagcatgccctgacttcaccccgctgtgtctgcttttcccgactattcttaatgagcttcgatgcaattcacgatcccgcagtgtgatttgaggagttttcaatggaatataaagatccaatgcatgagctgttgagcagcctggaacagattgtttttaaagatgaaacgcagaaaattaccctgacgcacagaacaacgtcctgtaccgaaattgagcagttacgaaaagggacaggattaaaaatcgatgatttcgcccgggttttgggcgtaagtgtcgccatggtaaaggaatgggaatccagacgcgtgaagcctagtagtgccgaactaaaattgatgcgtttgattcaagccaacccggcattaagtaagcagttgatggaataaacttttatccactttattgctgtttacggtcctgatgacaggaccgttttccaaccgattaatcataaatatgaaaaataattgttgcatcacccgccaatgcgtggcttaatgcacatcaacggtttgacgtacagaccattaaagcagtgtagtaaggcaagtcccttcaagagttatcgttgatacccctcgtagtgcacattcctttaacgcttcaaaatctgtaaagcacgccatatcgccgaaaggcacacttaattattaaaggtaatacactatgtccggtaaaatgactggtatcgtaaaatggttcaacgctgacaaaggcttcggcttcatcactcctgacgatggctctaaagatgtgttcgtacacttctctgctatccagaacgatggttacaaatctctggacgaaggtcagaaagtgtccttcaccatcgaaagcggcgctaaaggcccggcagctggtaacgtaaccagcctgtaatctctgcttaaaagcacagaatctaagatccctgccatttggcggggatttttttatttgttttcaggaaataaataatcgatcgcgtaataaaatctattattatttttgtgaagaataaatttgggtgcaatgagaatgcgcaacgccgtaagtaaggcgggaataatttcccgccgaagactcttactctttcaatttgcaggctaaaaacgccgccagctcataactctcctgtttaatatgcaattcacacagtgaatctcttatcatccgggtgaaaaataaaagcgtgaaacaaatcactattaaagaaagtaatctatatttctgcgcattcccagcctcctgtgttgatttccaacgagtataactttgatttatagtcaggtggggcttttctctgtctgcctttcggtgaatacctgagacaaacagtctcaagcacccgtggctattctagcttaataagtttgtttcttctccttgatataatcctaaaaaaatctcataaaattaatatatgagataatctttattcagcagaagattattaaaggttgctgtattatttagcgataaaaaaagcctgccagatggcaggctatttaataacggcgttattattgcaacaggctaatatccgcaacgcgcaggaacagttcgcgcagtttctccagcatggtcagacggttgatacgcaattctttgtcatcaaccatgaccatcactttatcgaagaaagcatcaaccggttcacgcagctcagccagttcgaccagcgcatcctggtaacgaccttccgtaaagtacggctccagcttgtcacgtagcaccacaacctgcatcgccagtttaatttcttccggctctttcagggtagaggcattcacgcggtcgctcagcacttcgtcagatttcgccagaatgttagatacacgtttgttcgccgccgccagtgcagcagctgcatccagggtacggaaatggcttaccgctttcatacgggcatcgaaatcagccggacgagtcggacgacgcgccagtaccgcctggatggtgtcaacggtataaccttcgtcctgataccaggcgcggaagcgaccgagcataaagtcgataacatcatcaactacgttggcattagtcagcttatcgccatacagacgcaccgcttcttcggtcagcgtttgcagatcaaggttgaggttcttctcaacgataattcgcagcacgccaagcgcggcacgacgcagcgcaaacgggtctttgtcgcctttcggatgctgaccgataccgaagatacccgccagggtatccatcttgtcagcaatcgccagcgcacaagctactgggttggacggcaggtcatcaccagcaaaacgcggctgatactgctcattcagcgccaccgcgacatcttccgcttcgccatcgtgacgcgcatagtgcatccccataacgccctgggtgtcggtgaactcgaagaccatgttggtcatcaggtcgcacttagacagcagacccgcacgggtagcgtggttaacgtcagcgccaatctgttcagcaatccagccagccagcgcctggatgcggtcagttttgtcgcgcagcgtccccaactgttgctggaacaacacggtttgcaggcgcggcaggttatcttcaagacgttttttacggtcggtgttgaagaagaactcggcatccgccagacgcggacgaacgactttctcgttaccggagataatctgctgcggatctttgctttcgatgttggcaacgaagataaagttcggcagcagtttgccgtcgttcgcatacaccgggaagtatttctggtcacctttcatggtgtaaaccagcgcttcagccggcaccgcgaggaatttctcttcgaattttgcggtcagaacgaccggccactccaccaggctagccacttcttccagcaggctttcgcttaagtcagcgttaccgccaatcttacgcgctgcttcttcggcatcggctttaatcttcgccttacgttcttcgtaatcggcgatgactttcccacgctcacgcagaatttccggatactgatcggcgttatcgatggtgaattccggctcgcccataaagcggtggccgcgaatcacgcgatcggactgaatgcccagaatggttgccggaatgactttgtcgcccagcagcagggtcacggtgtgcaccggacgcacgaagtgcacgtcgcttgcgccccaacgcatcagtttcgggatcggcagtttcgccagagaagtcgcaaccatattcggcagcagtgcttcggtgctttcgcccttcacatgggcgcgatacagcagccattcgcctttatcggtagtcagacgctcagcctggtcaacggtaataccgcaaccacgcgcccaaccttctgccgctttgctcggtttgccttcagcgtcgaacgcctgggcaatcgccgggccgcgtttttcgatttcacgatccggttgcgcttccgccaggttagctactttcagcgccagacgacgcggagcagcaaaccattgaacggtgccgtgtgcgaggccagcgctatccagctccgcagtaaagttcgcagcaaaggactcagccaggctgcgcagtgcttttggtggcagctcttcagtgccgatttccaccagaaaagttttctcagacatagccgcctcttacttatctttgttgcacatcgggaagccgagggcttcacgggaagcgtagtatgcttctgccactgctttggtcagggtgcgaatgcgcagaatgtagcgctgacgctcggtgacggagatggctttacgcgcatccagcaggttgaagctgtgggcggctttcagaatacgctcgtaggctggcagcggcagcggattttccagcgccagcagctgctgcgcttctttctcgtactgctcgaagcaggtgaacaggaagtccacatccgcgtattcgaagttgtaagtggactgctccacttcgttctgatggaacacgtcgccgtaggtggttttacccagcgggccgtcgctccagaccaggtcgtaaacgctgtctacgccctgaatgtacatggccagacgttccagaccgtaggtgatctcgccggtaaccggtttacactccagaccaccaacctgctggaagtaagtgaactgcgtcacttccatgccgttcagccacacttcccagcccagtccccaggcacccagcgtcgggttttcccagttatcttccacgaaacggatgtcgtgaatagtcgggtccatgcccagctctttcagagaaccgaggtacagctcctgaatattgtccgggcttggcttaatgaccacctggaactgatagtagtgctgtaaacggttggggttttcgccgtagcgaccatcggtcgggcgacgagaaggctgaacataagcagccgccatcggttctggccccagctcgcgcagacaggtcattgggtgagaggttcccgcgccgacttccatgtccaatggttgaacaatggtgcagccctggcgagcccagtaatcctgtaaggtcaggaacaagccctggaaggtcctggtatcaaacttttgcatattatttcgtgctggatacgtgtggatttaaaggaagggatcagtatacccgctggatggaagatatacagtacgaaacgggaaaaagcagggcttaacgcatggaaagatgcaaaaaatggccatccgcgtcaaaagaacagacaaactgctctttacggaaggtataaccgcgcatttcatagcttccctggaactgttcgaaggcggtgacgtcgattttttgctcgccggtgttataacgttttgccgcctgatccttgcataacgcttccatattcaagctacgcagaggatcaacctttacccgttgtgctttctgcacgggactcggtatagaacaacccactagcaccataagcgccattgccggaaagaaagcgttcatcatcattaaattaccgtctggtttgcaggtgagtcttattatttatatcggtatagtggctgatatcttacgaatttccttaagcctctataagctgtagtgataaaactcagattattccagtgcgccaaccaaatgatttatcggtcagactttttttaaccagatacagagacacagatgcagcccaaaatttactggattgataacctgcgagggatagcgtgtttaatggtggtgatgattcacaccactacctggtatgtgaccaatgctcatagtgttagccccgtcacatgggatatcgccaatgttctgaattctgcctctcgtgtcagcgtgccgctatttttcatgatttccggctatctcttttttggcgaacgcagcgcccagccgcgccatttcttgcgtatcggcttatgtctgattttttatagcgcaatcgcactgctctacattgcgctgtttacctccatcaatatggagttagcgctgaaaaacctgctgcaaaagccagtgttttaccacttgtggtttttcttcgcgattgcggtgatttatctggttagtccgctgattcaggtgaagaacgtcggcggaaaaatgttgctggtgctaatggcggtgattggcattatcgctaacccaaacacagtgccgcagaaaattgacggttttgaatggctgccaattaacttatatatcaatggcgatactttttactacattctgtatggcatgttgggccgcgctatagggatgatggacacacagcataaagcactgagctgggtgagcgccgcgctgtttgcgacgggggtttttattatctctcgcgggacattatatgaattgcagtggcgcggaaattttgccgatacctggtatctttactgtgggccgatggtttttatctgcgcaatcgcgctattgactctggttaaaaacacgctggatacgcgtaccattcgcggacttggcttaatctcccgccatagtttgggtatatacggattccacgccttgattatccatgcgctgcgcacccggggaattgagcttaaaaattggccaatactggatattatttggatcttttgcgcgacgttggcagcgagtttgttactttctatgctggtacaacgaatcgacagaaacagattagtgagttaagtaaaagcccggtcacattggactgaccgggcttacgtgagttattcgctgtattcttcctgggtaacctgtgtttcttttggtgggtttattccggcatcacgaatatttttctgcaccgctactgcaccaaacaagcttaagaagaaagccagtccataaaaacctttttcgctgagtaataatgtcgcattccacagacctaccatcagtaatgcaacagagataataaagacagtcaggcaggtcatataataaatggaagtggtcggtatgccttcatacttgtcccgaacggtcttttgataagacgccgcagaaaacagtcctaataccagtacggcaaaataatatcctttttcatttaactgcatctctgcattccatagccctaacagataggtaacgataccaccaacgagagctatccaactcacaatactaaaggccggactataggtacttattttgttgtccatcacagtattcctttcattcctgaatatgtaagagctttatgttgctcatgcgctgcgaaacaaacgcatttgaccaaacaagcagacaaaaaaggcgatgggatagatcaccatttcataagtattgataggtgcgtttaaaacaccgataaacaagagaccgatagtgattaacgcaactaactggcagatatgggtaaaaaaatcatccagttgcccgagtttttctgcgcgaagatatgcatagttgccaaaagttgctgtcattaacacgccaagaaaatagccttttccacttaacaatgggcaactgatccatagcccaaccagataaaccagcgccccgacaacaaataatagtttcgccacagtcttactggttttcataacgatctccatatctaccagcgatacattacgagtaaccaacgaaagacaaaactgaaaaatgccattaacaaatgattttcagaataaattcatactaaatattaattaattactgagatatatagatgtgaattatcccccacccggtcaggcaggggataacgtttacgccattaatggcagaagttgctgatagaggcgacggaacgtttctcgtcgtggctgataagcggcataacgctgcgcatctggtagatggctctgttctaacggtagttgcggcaacaattcaatgaggcttttctctggattcgccgcgatctgcgccagccttgctgcgcccagtgctggccccacatccccccccgtacggtaatcgagctgctgaccgctgatatccgccagcatctgacgccagtactcactacgcgccccgcccccaatcaacgtaacactttgcggtttaataccgcaggcatgcacgacatccatgccatctgccagcgcataacccacgccttccagcactgctcgcgccagttcattggggccatgttgatgagtcaaaccaaagaaaacccccttcgcctggggattattgtgtggcgtacgctcgccggaaagataaggcagaaaccaaactggctcggcactttcatcagcctgttgagctgcagcgattaaagctgggacattgctcaggccggttaatttcgcggcccaatccagacagctcgctgcactcagcatcacagacattaaatgccaacgttgcggtagcgcatggcaaaagctatgtacggcgctttctggcttgcttaagaacccttcgctgacagcaaaatagaccccgctcgtccccaggcttaacattgcctgattagcatcaaccattcccacaccaactgcaccagctgcattgtcgccaccgcctgcgacaactggcaccgtcgccataccccacgctttcgcaacttcaggtaacaaagcaccagtaatttcgctgccttcgtataatgcgggcatctggtcacgagataagtcgcaagcctgcagcatgacgtcactccagtcacgctttgcgacatccagccacatggtgccagctgcgtcagacatatcgctggcaaactcccccgtcatacgcagacgcaagtaatctttcggtaataatactttgtcgatttgacggaatatctccggctcatgccgctgaacccatagcaatttaggcgcagtaaatccgggcatcatcaggttgccggtaatcacccggctttgcggaactcgcgcttccagcaaagtgcactcttgcgcacagcgcccgtcgttccacaaaatggcagggcgtaacacccgttgctgagcatccagcaaggttgctccgtgcatctggccggcaatacccaatgctttaacgtcctgcagagaatgctgatcgcccagagctttcattgcgcgatcagttgcctgccaccactgttccgggtcttgttcgctccagagtggatgcgggcggctaacggtcagcttttccgtttgcgcagcaaccacctcaccctgctcgttgagcaaaataacttttacgccgctggtgccaagatctatcccgatatacatatcgatcgttccttaaaaaaatgcccggtatcgctaccgataaccgggccaacggactgcacagttagccgttatttgtcgaacagataatggtttaccagattttccagttgttcctggcgaccactctgatgcaccggagacaaatgatgttcctgagcatatttggctaaatctgccagactcatttggcctttcaggatttgctggcccaattcgctattccagccggaataacgctgcgcgatgcgtttatccagctcgccatcttcaatcatgcgcgctgcaattttcagcgccagtgccatcgtatccatcgcgccgatatgaccgtaaaacagatcatatttatcagtactttgacgacgtactttggcatcgaagttcagaccaccggtggtgaaaccgcctgctttgagaatttcatacatcaccagcgcattctcttccacactgttcgggaactggtcggtgtcccagcccagttgcgcatcgccacggttggcgtcgacagaaccgaacaggccaagcgcaatggcggtggctatttcatgatggaaagagtgacctgccagcgtcgcgtggttagcttcaatgttcagtttaatctctttttccagaccaaactgtttcaggaagccatagaccgtcgcggcatcgtaatcatattgatgtttggtcggttcttgcggtttcggttcgataagcaacgtgccctggaaaccgattttatgtttatgctcaaccaccatctgcataaagcggcccagttgttcacgctcctgacgcaagtcggtatttaacagcgtttcgtaaccttcacgaccgccccacaggacatagttttcaccgcccaatttatgggttgcttccatcgctgtaacaacttgcgttgccgcccagctgaagacttcaggatctgggttcgtcgccgcacccgcgccgtagcgagggtttgtaaagcagttggccgttccccacagcagcttcacgccgctctcttcttgcttgcctgccaggacatcaaccatttgcgcaaaattattgatgtactcttttaagctcgcgccctcaggggaaacatccacatcgtggaagcaataaaatggcacatgtaacttgtggaaaaactcaaatgcgacatctgctttacgcttcgccaacgccagtgcctcaccaggctgctgccacggacgattaaacgcccccacaccaaacatatccgccccgttccagcagaaggtgtgccagtagcaggcggcaaaacgcaagtgctcttccatacgcttacccaacaccagttcgtcgggattgtagtgacggaatgctaacgggttactggatttactgccttcataacgaacgcgatcgagctggtcaaaataggcttgcatattgaactccataatcaggtaatgccgcgggtgatggatgatgtcgtaatattgggcactccctttcagttgctcaattatgttatttcacactgctattgagataattcacaagtgtgcgctcgctcgcaaaataaaatggaatgatgaaactgggtaattcctcgaagagaaaaatgcaataagtacaattgcgcaacaaaagtaagatctcggtcataaatcaagaaataaaccaaaaatcgtaatcgaaagataaaaatctgtaattgttttcccctgtttagttgctaaaaattggttacgtttatcgcggtgattgttacttattaaaactgtcctctaactacagaaggccctacaccatgaaaataaagaacattctactcaccctttgcaccagtctcctgcttaccaacgttgctgcacacgccaaagaagtcaaaataggtatggcgattgatgatctccgtcttgaacgctggcaaaaagatcgagatatctttgtgaaaaaggcagaatctctcggcgcgaaagtatttgtacagtctgcaaatggcaatgaagaaacacaaatgagccagattgaaaacatgataaaccggggtgtcgatgttcttgtcattattccgtataacggtcaggtattaagtagcgttgtaaaagaagccaaacaagaaggcattaaagtattagcttacgaccgtatgattaacgatgcggatatcgatttttatatttctttcgataacgaaaaagtcggtgaactgcaggcaaaagccctggtcgatattgttccgcaaggtaattacttcctgatgggcggcagcccggtagataacaacgccaagctgttccgcgccggacaaatgaaagtgttaaaaccttacgttgattccggaaaaattaaagtcgttggtgaccaatgggttgatggctggttaccggaaaacgcattgaaaattatggaaaacgcgctaaccgccaataataacaaaattgatgctgtagttgccagtaacgatgccaccgcaggtggggcaattcaggcattaagcgcgcaaggtttaagtgggaaagtagcaatctccggccaggatgcggatctcgcaggtattaaacgtattgctgccggtacgcaaactatgacggtgtataaacctattacgttgttggcaaatactgccgcagaaattgccgttgagttgggcaatggtcaggaaccaaaagcagataccacactgaataatggcctgaaagatgtcccctcccgcctcctgacaccgatcgatgtgaataaaaacaacatcaaagatacggtaattaaagacggattccacaaagagagcgagctgtaagcgttacgccccagcgcggagcgggggcgtgatttctctccatgccgcgtgaatgaattggcttaggtggagtcgttatgccttatctacttgaaatgaagaacattaccaaaaccttcggcagtgtgaaggcgattgataacgtctgcttgcggttgaatgctggcgaaatcgtcagtctttgtggggaaaatgggtctggtaaaagtacgctgatgaaagtgctgtgtggtatttatccccatggctcctacgaaggcgaaattatttttgcgggagaagagattcaggcgagtcacatccgcgataccgaacgcaaaggtatcgccatcattcatcaggaattggccctggtgaaagaattgaccgtgctggaaaatatcttcctgggtaacgaaataacccacaatggcattatggattatgacctgatgacgctacgctgtcagaagctgctcgcacaggtcagtttatccattagtcctgatacccgcgttggcgatttagggcttgggcaacaacaactggttgaaattgccaaggcacttaataaacaggtgcgcttgttaattctcgatgaaccgacagccagtttaactgagcaggaaacgagcattttactggatattattcgcgatctacaacagcacggtatcgcctgtatttatattagccacaaactcaacgaagtcaaagcgatttccgatacgatttgcgttattcgcgacggacagcacattggtacgcgtgatgctgccggaatgagtgaagacgatattatcaccatgatggtcgggcgagagttaaccgcgctttaccctaatgaaccacataccaccggagatgaaatattacgtattgaacatctgacggcatggcatccggttaatcgtcatattaaacgagttaatgatgtcagcttttccctgaaacgtggcgaaatattgggtattgccggactcgttggtgccggacgtaccgagaccattcagtgcctgtttggtgtgtggcccggacaatgggaaggaaaaatttatattgatggcaaacaggtagatattcgtaactgtcagcaagccatcgcccaggggattgcgatggtccccgaagacagaaagcgcgacggcatcgttccggtaatggcggttggtaaaaatattaccctcgccgcactcaataaatttaccggtggcattagccagcttgatgacgcggcagagcaaaaatgtattctggaaagtatccagcaactcaaagttaaaacgagctcccccgaccttgctattggacgtttgagcggcggcaatcagcaaaaagcgatcctcgctcgctgtctgttacttaacccgcgcattctcattcttgatgaacccaccaggggtatcgatattggcgcgaaatacgagatctacaaattaattaaccaactcgtccagcagggtattgccgttattgtcatctcttccgaattacctgaagtgctcggccttagcgatcgtgtactggtgatgcatgaagggaaactaaaagccaacctgataaatcataacctgactcaggagcaggtgatggaagccgcattgaggagcgaacatcatgtcgaaaagcaatccgtctgaataacgcattgaggagcgaacatcatgagcaaaagcaatccgtctgaagtgaaattggccgtaccgacatccggtggcttctccgggctgaaaagtctgaatttgcaggtcttcgtgatgattgcagctatcatcgcaatcatgctgttctttacctggaccaccgatggtgcctacttaagcgcccgtaacgtctccaacctgttacgccagaccgcgattaccggcatcctcgcggtaggaatggtgttcgtcataatttctgctgaaatcgacctttccgtcggcagtatgatggggctgttaggtggcgtcgcggcgatttgtgacgtctggttaggctggcctttgccacttaccatcattgtgacgctggttctgggactgcttctcggtgcctggaacggatggtgggtcgcgtaccgtaaagtccctagttttattgtcaccctcgcgggcatgttggcatttcgcggcatactcattggcatcaccaacggcacgactgtatcccccaccagcgccgcgatgagtcaaattgggcaaagctatctccccgccagtaccggcttcatcattggcgcgcttggcttaatggcttttgttggttggcaatggcgcggaagaatgcgccgtcaggctttgggtttacagtctccggcctctaccgcagtagtcggtcgccaggctttaaccgctatcatcgtattaggcgcaatctggctgttgaatgattaccgtggcgttcccactcctgttctgctgctgacgttgctgttactcggcggaatgtttatggcaacgcggacggcatttggacgacgcatttatgccatcggcggcaatctggaagcagcacgtctctccgggattaacgttgaacgcaccaaacttgccgtgttcgcgattaacggattaatggtagccatcgccggattaatccttagttctcgacttggcgctggtagtccttctgcgggaaatatcgccgaactggacgcaattgcagcatgcgtgattggcggcaccagcctggctggcggtgtgggaagcgttgccggagcagtaatgggggcatttatcatggctagtctggataacggcatgagtatgatggatgtaccgaccttctggcagtatatcgttaaaggtgcgattctgttgctggcagtatggatggactccgcaaccaaacgccgttcttgattttgataaaaattttctcaaagccggttacgtattaccggttttgagtttttgcatgattcagcaggaaaagaaccatgtttactaaacgtcaccgcatcacattactgttcaatgccaataaagcctatgaccggcaggtagtagaaggcgtaggggaatatttacaggcgagtcaaagcgaatgggatattttcattgaagaagatttccgcgcccgcattgataaaatcaaggactggttaggagatggcgtcattgccgacttcgacgacaaacagatcgagcaagcgctggctgatgtcgacgtccccattgttggggttggcggcagctatcaccttgcagaaagttacccacccgttcattacattgccaccgataactatgcgctggttgaaagcgcatttttgcatttaaaagagaaaggcgttaaccgctttgctttttatggtcttccggaaagtagcggcaaacgttgggccactgagcgcgaatatgcatttcgtcagcttgtcgccgaagaaaagtatcgcggagtggtttatcaggggttagaaaccgcgccagagaactggcaacacgcgcaaaatcggctggcagactggctacaaacgctaccaccgcaaaccgggattattgccgttactgacgcccgagcgcggcatattctgcaagtatgtgaacatctacatattcccgtaccggaaaaattatgcgtgattggcatcgataacgaagaactgacccgctatctgagccgtgtcgccctttctagcgtcgctcagggcgcgcggcaaatgggctatcaggcggcaaaactgttgcatcgattattagataaagaagaaatgccgctacagcgaattttggtcccaccagttcgcgtcattgaacggcgcagtacagattatcgcagcctgaccgatcccgccgttattcaggccatgcattacattcgtaatcacgcctgtaaagggattaaagtggatcaggtactggatgcggtcgggatcagccgctccaatcttgagaagcgttttaaagaagaggtgggtgaaaccatccatgccatgattcatgccgagaagctggagaaagcgcgcagtctgctgattagtaccaccttgagcatcaatgagataagccaaatgtgcggttatccaagcctgcaatatttctactctgtttttaaaaaagcatatgacacgacgccaaaagagtatcgcgatgtaaatagcgaggtcatgttgtaacgatgatgagaattgtcggcgtcacatcaggtaacgctgcgtggttgtcggatgcggcgtgaacgccttatccgacctacccgccaggcatgataaaacgcaccaacaacgcttcaggctcgtagctcaactgcctgagacaaagtaaaaagccttatccgactgacaagtcggataaggctcaaggaaatgcaattacatatgcgccgcgattaaccgttggttatcctggtacattgcgaacaggtagttgttataactcttccctttggtgctgtagcccttcagcttgtgaatcatcgctgtggcagtcacttcctgatccgctttacgcagctgcgcacggcttttacggaagctagagtaagccgggtgcgtattcaggttagtgacataggcgctcacgctttctttgacagaactaaactgactgtaccctttcactttacctggcgcattggtacaacgtcctttcatgcatttcatgccgaacaggttgttgttgttgcgcgccagcttgctcgttccccaaccgctttctgctgcagccatcgtcgccaccatactggtggggataatgtctacgcgttcaagcaaggtattccacgggatttttcgcgtattaccggaccacttcaccttgtagcgtttggcgatgtctttcagacgcgcacgctcagcaggactccattggccctgatactgtttactaatgagccagttacgttccgcagtaatggccgcattttggctggtaatgtaaggcattacggtccggagaaacgcctttttccttggtgttccggaagggtattttcgcaaatcaggaagactactactctttgcactattgcgagaatactcttgtttactgcttacctgtttattactagctttagttaagtgggacttttgactcgctgttgttgtgtgcgtcttcgctaacacctcactgctaaacaccagagtgagtaacataagaatcatcgccccatatcgtcgtatgggagtcaaaatcatcaggtctcctggtcggatttaatcattccaacaccttatatttttcacaaatttgagagttgaatctcaaatcatatcaaaaatagctgtcaagagcaccccaaggaatagtccaaatctgaaactatgtcacgtgttaacgattcagattggcgctaaatcgcagaaaatgtgggggttatcgcaaaattcagccgttttttgcgcgagatcgctcacccttgcttctcatcctgtggacttaccgctcagggatgagttttgtttggcttatcgctggcaaactgtctgaaatcgcagcaataaggactcatccgccatgaaactcgccgcctgttttctgacactccttcctggcttcgccgttgccgccagctggacttctccggggtttcccgcctttagcgaacaggggacaggaacatttgtcagccacgcgcagttgcccaaaggtacgcgtccactaacgctaaattttgaccaacagtgctggcagcctgcggatgcgataaaactcaatcagatgctttccctgcaaccttgtagcaacacgccgcctcaatggcgattgttcagggacggcgaatatacgctgcaaatagacacccgctccggtacgccaacattgatgatttccatccagaacgccgccgaaccggtagcaagcctggtccgtgaatgcccgaaatgggatggattaccgctcacagtggatgtcagcgccactttcccggaaggagccgccgtacgggattattacagccagcaaattgcgatagtgaagaacggtcaaataatgttacaacccgctgccaccagcaacggtttactcctgctggaacgggcagaaactgacacatccgcccctttcgactggcataacgccacggtttactttgtgctgacagatcgtttcgaaaacggcgatcccagtaatgaccagagttacggacgtcataaagacggtatggcggaaattggcacttttcacggcggcgatttacgcggcctgaccaacaaactggattacctccagcagttgggcgttaatgctttatggataagcgccccatttgagcaaattcacggctgggtcggcggcggtacaaaaggcgatttcccgcattatgcctaccacggttattacacacaggactggacgaatcttgatgccaatatgggcaacgaagccgatctacggacgctggttgatagcgcacatcagcgcggtattcgtattctctttgatgtcgtgatgaaccacaccggctatgccacgctggcggatatgcaggagtatcagtttggcgcgttatatctttctggtgacgaagtgaaaaaaagcctgggtgaacgctggagcgactggaaacctgccgccgggcaaacctggcatagctttaacgattacattaatttcagcgacaaaacaggctgggataaatggtggggaaaaaactggatcagaacggatatcggcgattacgacaatcctggattcgacgatctcactatgagcctagcctttttgccggatatcaaaaccgaaagtactaccgcttctggtctgccggtgttctataaaaacaaaatggatacccacgccaaagccattgacggctatacgccgcgcgattacttaacccactggttaagtcagtgggtccgcgactatgggattgatggttttcgggtcgataccgccaaacatgttgagttgcccgcctggcagcaactgaaaaccgaagccagcgccgcgcttcgcgaatggaaaaaagctaaccccgacaaagcattagatgacaaacctttctggatgaccggtgaagcctggggccacggcgtgatgcaaagtgactactatcgccacggcttcgatgcgatgatcaatttcgattatcaggagcaggcggcgaaagcagtcgactgtctggcgcagatggatacgacctggcagcaaatggcggagaaattgcagggtttcaacgtgttgagctacctcagcagccatgatacccgcctgttccgtgaagggggcgacaaagcagcagagttattactattagcgccaggcgcggtacaaatcttttatggtgatgaatccagccgtccgttcggtcctacaggttctgatccgctgcaaggtacacgtagcgatatgaactggcaggatgttagcggtaaatctgccgccagcgtcgcgcactggcagaaaatcagccagttccgcgcccgccatcccgcaattggcgcgggcaaacaaacgacacttttgctgaagcagggctacggctttgttcgtgagcatggcgacgataaagtgctggtcgtctgggcagggcaacagtaacttttccggcttcccgttcgtcagtacctcgggaagccgccaaccaggataaaatgtcagccctaatcagcgttgcaggataaagcaccgctcactcttcaacagaccgatttgcaccccagcaaatgtagcgttattgttaccttccttgctacagagttcgacagatatcccgctatgacattctccctttttggtgacaaatttacccgccactccggcattacgctgttgatggaagatctgaacgacggtttacgcacgcctggcgcgattatgctcggcggcggtaatccggcgcagatcccggaaatgcaggactacttccagacgctactgaccgacatgctggaaagtggcaaagcgactgatgcactgtgtaactacgacggtccacaggggaaaacggagctactcacactgcttgccggaatgctgcgcgagaagttgggttgggatatcgaaccacagaatattgcactaacaaacggcagccagagcgcgtttttctacttatttaacctgtttgccggacgccgtgccgatggtcgggtcaaaaaagtgctgttcccgcttgcaccggaatacattggctatgctgacgccggactggaagaagatctgtttgtctctgcgcgtccgaatattgaactgctgccggaaggccagtttaaataccacgtcgattttgagcatctgcatattggcgaagaaaccgggatgatttgcgtctcccggccgacgaatccaacaggcaatgtgattactgacgaagagttgctgaagcttgacgcgctggcgaatcaacacggcattccgctggtgattgataacgcttatggcgtcccgttcccgggtatcatcttcagtgaagcgcgcccgctatggaatccgaatatcgtgctgtgcatgagtctttccaagctgggtctacctggctcccgctgcggcattatcatcgccaatgaaaaaatcatcaccgccatcaccaatatgaacggcattatcagcctggcacctggcggtattggtccggcgatgatgtgtgaaatgattaagcgtaacgatctgctgcgcctgtctgaaacagtcatcaaaccgttttactaccagcgtgttcaggaaactatcgccatcattcgccgctatttaccggaaaatcgctgcctgattcataaaccggaaggagccattttcctctggctatggtttaaggatttgcccattacgaccaagcagctctatcagcgcctgaaagcacgcggcgtgctgatggtgccggggcacaacttcttcccagggctggataaaccgtggccgcatacgcatcaatgtatgcgcatgaactacgtaccagagccggagaaaattgaggcgggggtgaagattctggcggaagagatagaaagagcctgggctgaaagtcactaaaaattgcctgatgcgctacgcttatcaggcctacatgatttctgcaatatattgaatttggaagaatttgtaggccggataaggcgtttacgccgcatctggcataaacaaagcgcactgttccggcgttgagaaacgccggaaaacgtttcaaacaggctgctgccgtagccgatgccgctgcactttctcgacatccatgcactgcaacgcctttgtcgggcaggcttcaacacaggccggtcccgtctcccgatgccagcacagatcgcacttaatcgccctcgcctttttgcggctagaaacgacctccatcgcaccaaacgggcaagccagcatacagcttttacagccaatgcaacgtgtttgttcaacgaaaatatgcccatgttcgcggcttatcgcgtcaacagggcagacattcgcgcacggtgcatcttcacactgatgacaggctactgccgtggtccagcagtggtctttaatgacacgaatacgggaaataaactcgtctggactcaacgcagcgcaatcctgattctcatgatggctcactgcgcaagccacttcacaggtacggcaaccgatacatttcgtcgcatccgcaataataaaccggttcatgatcactcctttgcactaaaacagcagagtgccagagagcgcgtccctactgctttgatccaacgaaggaaatgttaaagttttggcacttgtccaaagcgttatgtgatcgcgcccaggtcatccctgacagtaaatcccagttcattagaaatagcctgcgcggtttcacgcagtggtttcaggagatttttctctcccacctgtttcagacgacttgtgctaaggctaatgctcacggcgtacggcacccgcccatgaatatcaaacaccggaacagcaatacaggagacgccgagttcgttttcttctctgtccatcgccgctccgctttcacgaatgtgcgccagttcgtcgaacatcgcgggcagctcggtaatggtattgcgggttaacggctggatctcatgctgatggctttcccagtaactcttcacgtagtccgggtgaccaaacgccatgtagatcttgcccattgcggaacagtagagcggcatatgctggccaatataggcacgggttcgcagcatcccggttgtgggttccagcttataaatcaaaatagcgtgatcgtcttcgcggctggagaagttaatggtttcaccagtggcgatgttcagtgcctcaagatgcggagcggcgatatgaatgatattcaggctagacagcgccttctgcccgacggcaataaatttggtggtcaggcgataactccctgcggcaggcgcggtggtcacatagccgcaggactgtaatccctgcaataagcgatggacggtactcttatttaaaccagccagctcgctaagatgcgccaacggacaaccgtttggatagttgctcaaaatctcaatcagcatcaacccgcgaaacagactctggcttccggctggacgctctttttcctgcgccatctcgttctctttttttcccatcacttctttccccattttgtcgcgtcctgatggtagcgcaaagtgtgccgtagttcacgatctcgacagataatttataaccaattgatttttatgtcttttgaaattcatcaatcagattgccttgttaaaaagtgatcgatatatttgaaatcaagtttcgcatattgaaattttaagccaaaaaagcgatcaaaaaaacaaggaagcctgggatgaaagtgacatttgagcagttaaaagcagcctttaatcgggtcttaattagtcgcggcgttgacagcgaaacggctgacgcctgtgcagagatgttcgcccgcaccaccgaatccggcgtttattctcacggcgttaatcgtttccctcgtttcattcaacaactggaaaacggcgatatcattcctgatgcccaacccaaacgtataaccagcctcggcgcaattgaacagtgggacgcccagcgtagcatcggtaacctgacagcgaaaaagatgatggatcgcgccattgaactggctgccgatcacggtattggtctggtggcactacgtaatgccaaccactggatgcgcggcggcagctacggctggcaggcggcggaaaaaggctatattggcatttgctggaccaactccatcgccgtaatgccgccgtggggcgcaaaagagtgtcgcataggcactaacccgctgatcgtcgccattccttccacgccgatcaccatggtcgatatgagcatgagcatgttctcttacggcatgttagaagttaaccgtctggcaggtcgtcagctcccggtcgatggtggctttgatgatgagggcaatttgaccaaagaacctggcgttatcgagaagaatcgccgcattttgccgatgggctactggaaaggttctggcatgagcattgtgctggatatgatcgctactctcctttccgacggcgcatccgttgccgaagtcacccaggacaacagcgacgaatacggcattagtcaaatttttattgccattgaagtggacaagcttatcgacggtcccacccgcgatgccaagctgcaacgcatcatggattacgttactagtgccgagcgtgctgacgaaaatcaggccattcgcttacccggccatgaatttactaccctgctggccgaaaaccgccgtaacggcatcactgttgatgacagcgtgtgggccaaaatccaggcgttatgaggagataagtcatgatttttggacatatcgcgcagcccaatccgtgccgtttgcccgccgccattgaaaaggcgctcgattttctgcgcgctaccgatttcaacgccctggagccgggcgttgtcgaaatcgacggcaaaaatatttatacgcaaattatcgatttaaccacacgcgaagcggtggtaaaccgtccggaagtgcatcgtcggtatatcgatattcagtttctggcgtggggcgaagagaaaatcggcattgctattgatacgggaaataataaagtcagcgaaagtctattagagcagcgcaatattattttttatcacgacagtgaacatgaaagttttatagaaatgataccgggcagctacgcaattttctttccgcaggatgttcaccgaccaggttgtattatgcaaacagcctctgagatacgaaaaattgtggttaaagtcgcattaacggcgctgaattaatcgaataatcgtctacgccagaacgcctgggtaatgttattgctctaactatattaataattcaggttgctgcacatgcgacttgaattatgacagacatagcctcaaggaatagctatgaaaaaaatactcgaagcaatactggcgattaatctcgccgtactttcctgtattgtatttataaacattattttaagatatggttttcagacaagcattttatctgttgatgaattgagtcgttatttatttgtctggttaacgtttattggcgcgattgtagcttttatggataacgcccacgttcaggtcacctttctggtggagaaactctcccccgcatggcagcgacgagtcgctctggttacccattccttaatcttatttatttgtggcgcactggcctggggcgcaacgctaaaaacaattcaggactggagcgattatagtccgatcctcggtttacccatcggcctgatgtatgccgcttgtctgcccaccagcctcgttatcgcattctttgaactgcgtcatttatatcaactcatcacgcgtagcaattctctaacgagcccaccgcaaggagcttaatcatggctgtgctgatttttctgggctgtctgttgggtggtattgctatcggtttgcctattgcctgggcactgttgttgtgcggggcggcgttaatgttctggctggacatgtttgatgtccagatcatggcacaaacgctggtgaacggagccgatagcttctccctgctggcgattccgttctttgtgctggcgggtgaaatcatgaatgcgggcggcttgagtaaacgcattgttgacctgccgatgaaactggtggggcataaaccaggcgggctgggctacgtcggcgtgctggcagctatgattatggcgagcctttctggttctgccgttgcggataccgccgccgttgccgctctactggtgccgatgatgcgcagcgccaactatccggtcaaccgggcggcggggctgattgcctctggcggcattatcgcgccaattattcccccttccattccgtttattatcttcggcgtttccagcggattatccatcagtaagctgtttatggcgggcattgcccctggcatgatgatgggcgcaacgctgatgcttacctggtggtggcaggccagtcgccttaatttaccccgccagcaaaaagcaacgatgcaggaaatctggcactcttttgtctccggtatctgggcgctgtttcttccagtcatcattattggcgggtttcgctccggcctgtttacccctaccgaagccggggccgttgctgctttctatgcgctgtttgtcgccacagttatttaccgtgaaatgaccttcgccacactttggcatgtactcattggcgcggcgaaaaccaccagtgtggttatgtttctggtggccagcgcacaagtttccgcctggctgattaccattgctgaactgccgatgatggtttctgatttactgcaaccgttggtcgatagtccgcgtctgctgtttatcgtcattatggtggctatcctgattgtcggcatggtcatggatttaacgccgacggtattaattcttaccccggtattaatgcctttagttaaagaggcaggaatcgatccgatttatttcggtgtcatgtttatcattaactgcagtatcggcttaattacaccgcctatcggtaatgtacttaacgttattagtggggtggcaaaactcaaattcgatgatgcagtcagaggcgttttcccttacgtcctggttttatatagtttattagtcgtatttgtttttattcccgatctcatcatcctccctttgaaatggattaattaaaaggaaaatattatgaaattacgctctgtaacctacgcattattcattgctggcctggctgcattcagcacatcttctctggcggcacaatctttacgtttcggttatgaaacaagtcaaaccgacagccaacatattgcggcgaaaaaattcaatgatttattgcaggagagaaccaaaggcgagctgaaattaaaactgttcccggacagcactctcggtaacgcgcaggcgatgatcagcggcgtacgtggcggcaccatcgatatggaaatgtccggcagcaataactttgccgggttaagtccagtgatgaacttgcttgatgtccctttcctgttccgcgataccgctcacgcgcataaaacgctcgacggcaaagtcggtgatgatctgaaagccagtcttgaaggtaaaggactgaaagtactggcctactgggaaaacggctggcgcgatgtcaccaacagccgcgcaccggttaaaacccccgccgacctgaaagggctgaaaatccgcaccaacaatagcccgatgaatatcgccgcattcaaagtctttggcgctaacccgatcccgatgccgtttgccgaagtctataccgggctggaaacccgcactatcgacgctcaggaacacccgatcaacgtcgtctggagtgcaaaatttttcgaagtgcagaagttcctttctctgacgcaccacgcctattccccgcttctggtggtgatcaacaaagcgaagtttgatggcttaagtccggagttccagcaggcgctagttagttctgcacaagaagcgggtaactatcagcgcaaactggttgctgaagatcagcaaaaaatcatcgacggcatgaaagaagcgggcgtggaagtcatcaccgatctcgaccgcaaagcctttagcgacgcactggggaatcaggttcgcgacatgtttgttaaagatgtgccgcagggagctgatctgctgaaagccgtggatgaggtgcaataaaccatgacgcaatactggctggggttagattgtggcggtagctggctgaaagccgggctgtatgaccgcgaaggccgggaggcaggcgtgcagcgcctgccgctgtgcgcattaagcccgcagccaggctgggcagagcgcgatatggcagaactgtggcaatgctgcatggctgtcattcgcgccctgcttactcattctggtgttagcggggaacaaattgtcggtatcggcatctccgcacagggaaagggcttgtttttgctggataaaaacgacaaaccgctcgggaatgctattttgtccagcgaccgccgggcgatggaaatcgttcgtcgctggcaggaagatggcatcccggaaaaactctacccgctgacccgacaaaccttgtggaccgggcatccggtgagcctgttacgctggctgaaagagcacgaaccagaacgctacgcgcaaattggctgcgtgatgatgacgcacgactacctgcgctggtgtttaactggcgtcaaaggctgtgaagagagcaatatttccgagtccaacctctacaacatgagtcttggggaatatgacccgtgcctcaccgactggctggggatcgctgaaatcaatcacgccctgccgcctgttgtcggatctgccgaaatctgcggggagatcaccgctcagacagccgccctgaccggtctgaaagcgggtacgcccgttgttggcggcctgtttgatgtggtttccaccgcactctgcgccgggatcgaagacgaatttaccctcaatgcggtgatggggacctgggcggtgaccagcggcataacccgcggtttacgtgacggtgaagcgcatccgtatgtctatggtcgctacgttaacgatggtgaatttatcgttcacgaagccagccctacctcttccggcaacctcgaatggtttaccgcacagtggggagaaatcagctttgatgagatcaatcaggccgttgccagcttgccgaaggctgggggcgatctctttttcctgccgttcctgtacggcagcaacgccggactcgagatgaccagtggtttctacgggatgcaggccattcacacccgcgcgcacctgttgcaggccatctatgaaggggtggtgttcagccatatgacccacctcaaccgaatgcgcgaacgttttactgatgttcacaccctacgcgtcactggcggcccggcgcactccgatgtctggatgcaaatgctggcggacgtcagcggtctgcgtatcgagctgccgcaggtggaagaaaccggctgctttggtgcggcccttgccgcccgcgtcggcaccggggtttatcacaacttcagcgaagcccaacgtgacttgcgacacccggtgcgcaccctgctgccagatatgaccgcccatcagctttaccaaaaaaaatatcaacgttatcagcatctcattgccgcacttcagggctttcacgcccgcattaaggagcacacattatgagccgaccacttctgcaactggccctcgaccacagtagtcttgaagccgcgcagcgcgacgtgacgctgttaaaagacagcgtcgatatcgtcgaagcgggcaccattctctgtttaaacgaagggcttggcgcggtgaaagccttgcgcgaacagtgcccggacaaaatcatcgttgctgactggaaggtcgccgacgctggtgaaacgctcgcgcaacaggcgtttggcgcaggcgctaactggatgaccatcatctgcgccgcgccgctcgcgacggtagaaaaaggccacgcaatggcacaacgctgcgggggtgaaattcagatagagctgttcggtaactggacgctggacgacgcccgcgactggcatcgtattggcgtgcggcaggccatttatcatcgcggtcgtgatgcacaggccagcgggcaacagtggggcgaagccgatctggcacgcatgaaggcgcttagtgatatcggccttgagctttccattactggcgggattacccctgctgacctgccgctgtttaaagatatccgcgtgaaagcgtttattgccgggcgggcactggcaggcgcggcaaatccggcgcaagtggctggcgatttccatgcgcaaatcgacgctatctggggaggtgcgcgtgcgtaatcatcagttagggatttatgaaaaagcgctggcgaaagatctctcctggccggagcggctggtgctggcaaaaagctgcggttttgattttgtcgaaatgagcgtggatgaaaccgacgaacggctcagtcgtcttgactggagcgccgcacaaaggactagcctggttgccgcgatgatcgaaacaggtgttgggatcccgagcatgtgcctgtccgcacatcgtcgctttccctttggtagccgtgacgaggcagtgcgcgaacgggcgcgggaaatcatgagtaaagcgattcgcctggcgcgcgatctcggcattcgcaccatccagctggcaggttatgacgtctattacgaagaccacgacgaaggcacccggcaacgttttgctgaagggctggcgtgggcagtcgaacaggcggcggcaagtcaagtaatgctggcggtggagattatggataccgcgtttatgaactccatcagcaaatggaaaaaatgggacgagatgctcgccagtccgtggttcaccgtctacccggacgtcggcaacctcagcgcctggggcaatgatgttcccgccgaactgaaactgggcattgaccgtatcgccgcgatccacctgaaagacacccagccagtcaccgggcaaagtcccggacagttccgcgacgtgccgtttggcgaaggctgcgtcgatttcgttggcatcttcaaaacgctgcataaactgaactatcgcggttctttcctgattgagatgtggaccgaaaaagccaaagagccggtgctggagattattcaggcgcggcgttggattgaagcgcgtatgcaggaggctggatttatatgttaacgtaaatgcaggaggctggatttatatgttagagcaactgaaagccgacgtgctggcggcgaatctggcgcttcccgctcaccatctggtgacgttcacctggggcaatgtcagcgcggtagacgaaacgcggcaatggatggtaatcaaaccttccggcgtcgagtacgacgtgatgaccgccgacgatatggtggtggttgagatagccagcggtaaggtggtggaaggcagcaaaaaaccctcttccgatacaccaacgcatctggcgctctaccgtcgctatgccgaaattggcggtattgtgcatacccacagccgccacgccaccatctggagtcaggccgggctggatctccccgcctggggcaccacccacgccgattatttttacggtgccatcccctgcacgcgacagatgaccgcagaggagattaacggcgaatatgaatatcagaccggcgaagtgatcattgaaaccttcgaagaacgtggcaggagtccggcacaaatcccggcggtgctggtgcattctcacggcccgttcgcatggggtaaaaacgccgccgatgccgtgcataacgccgtagtactcgaagaatgcgcctatatgggtctattcagccgccagcttgcgccgcagctccctgcgatgcaaaacgaactgctggataagcactacctgcgtaagcatggggccaatgcctattacgggcagtaatccctcacgccggggcttcatcgccccggcactacgaattgatatgttccttgctgtaacgccgcttccacgctgctggcgttaaaccagtatgtttctgaaaaatctgccggaaatagccaacgtcattaaaccgtattgcatggagcaggccgacaacgtcgagtcactgcataacctgttgctgcccgccgatgcgccatttacgacatttgaaggcaagggattgttcagccataagatcctgattcagacgccaggttcccggtatgaacagagcaatccagagcaacaacctttgtggcattacgacggagcaccagccgcaccgacatccaccggtgaattaaaaacgccagctcaccccggtgacaaaggtaaaactctcattacgatcaatcatcgggctgtcggtaatctcttccggcagctcgctgtatcctgcgctcgccatcaatacgacgtgctctcctatcgggtattttgccgtcaggctgacatagggcacccaggcatcctgcgcggaataacttgccagaccgctacgacgggactcactctcactaatgccatagtaatagtcactgaaattctcgtcataatagagaacgcccagcgcaggtgtcaggctcagacgacctatccgcattttgtggaatacgcttagctcccccacccagccgttgctgttatccagaacgtccgcagctgcagaggctttcacggttccccaacgctcgtggtgataccaggcaacccccgccatagccgtactatcacgcttatcaagctgttgcatggcataatcgtcattatcggtagggtcaaattccagcggcatccaggatgcggtcaggctaagttcatttttttcactttggctcagaataaaacctaacgtggtctgacgaacataaaaagtatcaccttcataactaatcagcggaattgccttcgtattttcattataaccgcgataagggctttcattataagccgcaccagcaccaatggataattcagaagcagttgcgcttgccataaaaggcaacgcaaataacgccacaatattgcgattaattaacatgtccggtattccattttaaaataagataaaaaagagtcggcataataatgcttacaatttctccggtgcaagattcatatttatatagtaatatataaaattatatataattgggctgttgcgatgacaaaattacaacttaagtaccgggagttaaaaattatcagcgtaatcgctgccagtgaaaatatcagccatgccgcgactgtacttggcatcgcacaggccaacgtcagcaaatatcttgctgattttgaaagtaaagtgggtttaaaagtccttgaccgaaccacccggcagctgatgctcacaccttttggcaccgcgctgttaccgtacatcaacgacatgctggacagaaacgagcaacttaataattttattgcagattataagcatgagaaacgtggtcgggtcaccatctacgccccaaccggcataattacctatttatccaaacatgtaatcgataaaattaaagatatcggtgatatcaccttaagcctaaaaacctgcaatcttgagcgtaatgccttttatgaaggcgtcgaatttcctgatgattgtgatgttttaatcagctacgctccaccaaaagatgaaagcctggttgccagttttattacccaatatgccgtaaccgcttatgccagccagcgctatcttgagaaacatcccattagccgtcctgacgaactcgaacatcactcctgtattttgatcgacagcatgatgatcgacgacgcgaatatctggcgcttcaacgtcgccgggagtaaagaggtgcgggattatcgcgtgaagggaaattacgtttgcgacaacacgcaatctgcgctggagctggcacgaaatcacctggggattgtgtttgcgccagacaaaagtgtgcagagcgacctgcaagacggcacgctggtgccctgctttcagcaaccctatgaatggtggctggatctggtggctatcttccgtaaacgggaataccagccctggcgggtccagtatgtgctggatgaaatgctgcgtgaaattcgccaccagcttgctcagagccagcaactgcggcctgaacaagcggcggaaagcgaagattaatgatcgagataaaggtaatgcacccagctggtcatgcgtaatagcactttgcgcatcacgctgacatggctgaaatgatcagagtaaaccgccacctgggcgtaaataccgtctggtaaagcgctcaaatcagtgtgctcatccagttcaatggtcgcgataacgccatcactacccggcgctgtgtttaacgtctgtaaggtgccggtgctctgataagctccgccgggaacggctggactaatggctgccagcttaccgctgaataccttacctggcagagcattaaacaccacttccgcatcgtcgccaggagccagtcgcagcaaggagttctgacggaactgcgccacgatttgtcgtttctgatcgggtataaacaccatcaccggacgtagcggcaggctcgcggcataggtacccggacgaatcagtacctgggtcacataaccatcgctcggcgcacgcactatcgtctgctcaaggttatattttgcttccgcgagctgtgctttcaggctggcgatttgagaatgttcacccaacaccaggctatccagctggctctggatctgtttttgttccgccgcgctactcttcacggaggcttcctgcgccagataattttgccgcgccacatcgatatcgcgttcactaaacgggtttactttcgcctggctgccacgtgcgtaacgctgatactctttagcgaatttatcccgcgtggcctttgcctgctgagtattcgccgccatctcatctaactctgcgcccaacgcccgctgtttatgttctgcggtaacgatatccgccatcagccgatccacccgcgcctgataacgcgtcgggtccagtcgaaatagcacctcaccttttttaatcagcgtatttttcttatccgtcacttcaatcaccacaccagtcacctgtgggacaacaggaatagaaataaccgctttttgcgctttaaaggtatacggatggttatagttcattaacagaattagaccgctgacaataaatattccacccagggccgctgtgggaatggtccatttatttacgggaattttgaagatcttaaacattgcccatgcaaaagccacataggtcaaaataatcagtaaatccataagtattactcggcagaagaggatttgatgtcggcgagctgtttctccagcccggcaatgcgctgttgcagttgcataacggaactatcatggctttgcattccccatccccgctccgggcggtaaagcgtggcccaaatccacaaaaacggccagataacatgtaacgtaaaaagactcacccaaccagcaacatgaatggcgtcggcatgaggatgattacgttttttggcaatcaggtagggaatatcatgtaaaataatgatcccatagaagatcaccagaaatacaaaaataagcactcccagtgcaaaatagtccaggaacatatttccctcaaagaatataaaaaagaacaattaacgcatattatgaaatgccatgatgcagtgcaatttccttatttatataacgacatattgttttttatatactttcttaaatgtgctgtctggtttttcaacaggacgaggtttatcatattgaaatagtggaactattggccaaactaatgaataactccagtaaaacatccacagtacagattaagcgtattaaaccttcaattatctaccgtttattgctgattggcctcggatcaccaatggtgatttacggcctggttcgcccgctcaccatcgaaacgcgagattaaactcctgacaaaacacgccccagaaacgtacttctgttggcgtagtctgggttattgcgcacgtaggtttaaaacgtaaattgtaacaacgtgcgctttgtttatgccggatgcggcgtgtacgccttatccggcctacggtcaggttcccgtaggcatgataagacgcgtaagcgtcgcatcaggcaatgaatacccaatgcgaccagcttcttatatcagaacagccccaacggtttatcgctgtagctcaccagcaggcacttggtttgctggtaatgctccagcatcatcttgtgggtttcgcgaccgataccactttgtttgtagccaccaaacgccgcatgtgccgggtaagcgtgataacagttggtccacacgcgcccagcctgtatgccgcgccccatcttataggccagattaccgttgcggctccagacgcccgcgcccaggccatattgcgtatcgttcgccagctccagcgcttcttccatcgttttgaaggtggtcaccgccagcaccgggccaaaaatctcctcctggaacacccgcatattgttctgaccaaacagaatcgtcggttcgaggtagtagccgtctttcagttcaccttccagcagcttgcgccgcccgcctgtgagcacgtcagcgccctcttttttaccgatatcaatgtagttgaggatggtttccagttgcccgtgagaaacctgcgcgcccatttgcgtcacgctgtcgagcgggttaccgctacgaatgctttcgacacggcggatggcgcgttccataaagcgttcgtagatagattcctgcactaaagcacgactcggacaggtgcaaacttcgccctggttaaaggcaaacagtgcaaagccttccagcgctttatcgaaaaaggcatcttcttcatccatcacatcagcaaagaagatatttgggctcttaccgcccaactccagcgtcaccggaataatgttttgcgttgcgtattgcataatttgttggcccacttccgtactgccggtaaacgccactttggcgatgcgtttgctggtcgccagatattcgccaattaccccacctgcgccattgaccacgttcaccacgcccggcggcagtaaatcaccgacaatttccattagcagcagtacagaaagcggggtaagacgtgcgggtttcagcaccacacagttgcccgccgccagcgcgggagccattttccagctcgccatcagcagcgggaagttccacgggataatctgccccaccacgcctaacggttcatggaaatgataggccacggtttcgctatcaacttcactgatcccaccttcctgcgcccgaatacagctggcgaaatagcggaaatggtcaatcgccagcggtacatccgcagcactggtttcgcgaatgggtttgccgttatcccaggtttcagctgtcgctaacagctcgaggttttgttccattcgatcggcaatcttaaacagaatcgccgcacgatcctgcacgctggtgtgcgcccatttatctttcactttgtgcgcagcatccagcgccagatcgatgtctcgtttgccgctagacgccacttcgcacagcagctgcccggtcaccggcgtcagattctggtaatactcgccgtcggcaggggctacccattcgccgccaataaagttgtcatagcgggcttttaacttgagggggaaaccatactcgccgggcttaatctgtgcactagggggattattggtcatgatcgtctccttgcggtgtgaggtataacaagggtagacgtgactggcgaaatcttcgccagtcggtaacagctttacgacagctatcacgaatttacgggcaagggttacagagatagttgaaaaagcggctaacaatttgccagccgttgtggaaatgatgattacatcgctgcgcgataaatcgccacaatttcttcgtgagttgcctggatcgggttagtaaagccacaggcatctttcagggcattagtcgccaataccgcgaaatcttcttctttcacgttcaggtcgcgtaggcctgccgggatatccactttcttcgccagttcacggatggcgttaatgcaggcttcagcaccttccgcgtcgtttttacctgtcacgttcacgcccattgcagcggcacagtcacgcagacgtgcagcggcgactttgctgttgaatacctgaacgtgcggcagcaaaacggcgttacatacaccgtgtggcaggttgtagaaaccgcccagctggtgcgccatcgcatgaacataacccagagaagcattattgaacgccataccggcgaggaactgggcataagccattgcttcacgcgctttcgcattactgccatcttcaacggctaacggcaggttttcggcaatcatggtcacggctttcagtgcacaagcgtcagtgatcggcgtggcggcaatagaaacatatgcttcgatagcgtgcgttaaggcatccatacccgttgcggcggtcagactcttcggcataccaatcatcagagaggagtcattgacagaaagcagcggagtgacatgtttatcaacaatcgccattttgatatgacgcgcttcgtcagtgatgatgcagaaacgggtcatttcagaggccgtacccgccgtggtattgatggcgatcatcggcagctgcggttttgcagagcggtcaacgccttcgtaatcgcgaatatcgccgccattggctgccaccagcgcaataccttttgcgcagtcgtgtggagaaccaccgcctaaggagatcacgctatcgcaattattctctttaagtaatttcaaacctgcggcgacgttttccgtggtggggttaggttgggtgccatcataaataacgctaaaaatattgcgttcttccagtgctttttgcacatcgcccgccatacctaatttcgttaacatattgtcagtgacaattaaggtacgggtaaatccataatctgccatcatattcattgcatcagtcaaactatcagcgccgatgacattcacagaaggaataaagaacgtactagctgccataacacactcctgaaagtgtaaaaaagggcgggcagcttactgaggattttcattcgaaaatatgatcagtattattgattatcaaaattaatctaataaaaagcacattgtattcattaaacaatgtgctttttttaaattcataagaattttgtattaatttattttaaaacttaattaatcatttccttatttttccggaaataataatgcgtcgcgcaataaatgatcatttccacgacgacgcgtaaagccaatgcggtcaaaatattccagaatctgaattgccagctttcggcctacgcctaagcgatcgcggaaatccgccgcgcaggtactaccacactcctgatcgagatcgcggatcatattggcaaactcgacaatccgatcgttacggtaataacgatctttaacgatcgcggtaattattccttgctgcgccgcctggcgtagagtcaggcgcattgcctgctcgtcggttcccgtctcttttgccaggtcacgcacccaccacggttcgtcaccaaacagtggctctgctttttgccagatggcctgctgctcttcgctgaagcccgctttgtgatctggcagatgcagccagccgtgatggctgtggatgtcgccgctttcgcgcatcttttcaatcagcaacagtaccagcgcttcatcttccattggcaacgccatacgtcgcagacgttcgcgcccagggccaggttcatcgcgatgttgctcatgataagtcgctaatgtgtcgagaattttccgctgccagcgggcggcaaccggcgcattcaacaagctataaccagcctgaatataaccaggctgttgcagcaattcgcgcatcccttcgccgttgagctggcgcgcccaggcgaaatccgcaaggttaaccgcgccgcgttccagatgaacagataacgcatcggcatcgctctgcgcccgtgcaagagacgccagccattgcagatattccggcttacgtttaccgcgacgcggcgggttaagcatcacgacgcgcgctccggccagcgtgttgcgggcagagatatcgcgcaataccaggcggtcgttatctgccagccataacggggtgtcgaagaccagttcagcaaggttatcttccagcagactaacgcgtcccgtgacgtggctggcggcgtggtgaatatgcagcggctgccactgggtcagcggtgtatgggtttgaagctcgacaatcacccgtgtgaacggctctggcggcacatcggcaagcagccagtcgccacggttaatctgctctttttccgcatcacccgcgatgttaagcgcgatacgctgcccggcattggcggtttctgttggctggttttgcgcatgcagcgcacgtacacgcatcggtttatttacaccagtcagccagagactatcgcctaccttcacttccccgcttaacgccgtaccggtgacgaccagcccggcaccttttacggtaaatgcgcggtcaatcgcgaggcggaaactatgttggctggcgtgctcgcgttccggcaactgaagcagatgctcgcgcagggcatccattccccgaccttcggttgctgcggtgataaacagttttgcctcagcaaaaccgtattcccgcagaacctcctttacctggcgttcaacctcatcaacacgcgcttcgtccacgcgatcggctttggtcagcgccactgtcagcatcgggttaccggtcagctgcaaaatcgccagatgctcacgggtctgtgccatcacgccgtcatcgcacgccaccaccaacagcgcgtgatcgataccaccaacgcccgccagcatgttggaaagaaacttttcatgaccgggaacgtcgataaaaccaggcacgcgaccatccggctgcggccagtaggcatagccgagatcgatggtcatgccgcgctttttttcttccggcagacggtcagcatttacgccagtaatcgcctgcaataaggttgttttgccgtggtcaacgtgtccggcagtcgcaataatcatttcaacaacatctccaaaaaccgttgctcatcttcaaggcagcgtaaatccagccacaatcgtccgtcataaatacgaccaatcaccggcactggcaattcacgccagcgggcggctaaactctcaaggtggctaccgcgtccatcatggggtgtaaacgttaatgccgcgctcggcaggcgatcaaccggcaggctaccactgccaatctggctaagacatggcataacctgtaccgcaaactccgcgccgtaatgtgcggcaaggggggcctgtaaacgttgtgcctggatttgaatgacctctgcgctgcgggtaagcaggcgcagggtcggtaatttttcactcagagcttcagggtgtaaataaagacgcaacgtggcttccagcgccgcgagggtcattttatccgcgcgtaatgcacgcttcagcgggtggctttgcaggcgggcgatcatctcttttttaccaacaataattcctgcctgcggcccgcctaacaacttgtcgccggagaaactcaccagactgacgcccgccgcaatcaactcctgcggcattggctctttcggcaaaccgtactggctaagatcgaccaggctgccactgcctaaatcagtcactacgggaacatccagctctttgccgagcgccaccagttccgcttcatctatcgctttggtgaacccctgaatgctgtagttactggtatgtactttcatcaacagtgcggtattttcattcaccgcctgacgataatcattcgcgtgcgtgcggttggtggtccctacttcgtgtagggtgcagcctgcctgacgcataacatcgggaatacgaaacgcgccgccaatctccaccagttcgccgcgagataccaccacctcttttccgctggcagtggccgccaacatcaataacaccgccgccgcattgttattgacgatacaggcatcttccgcccccgtaatacggcacagcagctgcgccagcgcccgatcgcgatgtccgcgtccggcgtcgtccagatcatactcgagggtcactgggctacgcatagcctgcgcaacggcttccaccgcggcttccgcctgtaaagctcgcccaaggttggtatgcagcacggttcccgtcaggttgatcaccggacgcagcgcgctctgcgcttctttcgtcaaccgggcatcgacttcttgcgcccagttttcacaccacgcaggcagcgtctggctgccacgaatcacttctcgcgcttcgtcgagcatctgacgcaacaattccaccacgcgggtgtgaccataagtatcacgcaaagaaaggaaggagctatcgcgcaataagcgatcaatagccggaagttgactatagagggaacgcgtttcggttgtcataggaaacctggctgatcaaggccctctcacacggagaagggcgtttaacataaccacggattgtaacgtgagatgggtcaggaggacatatcgcgcatcaagcctttggcggttcggtgcgagcaaaactttcgcggctaaacaggttttcgaccagtttgactaagtgtgggcggtcgacacaccaacctggcgcaacgcggcggaaattgagatatccgacggcacaggcaatggcgatagtcgccagattgaccgtatcggttttgagtgtgccatcgaccagatatccttccagcacatccagactgcggttgattttctcccgctggcgtaacaattcatcttcagactgctgcgccgctggacgcgcctgttcacgcacgcttaccagcccggcatccataatgccatccgccagtgcctcaattttgcgcacccgcaagctctccagcggatcgcgcggcaacatcgccggagcgacattcattaattcaatatattcagcgatgatcgggctatcaaaccagcattcgccctcttcggtcaccagcaccggcacttttcctaacgggttaaattgcgccacgccgttgtccgcgttatagggcagttcattaataaattcgaaagttatgcccttttctaacaacagaatagaaagtttgcgtacaaacgggctggtgtagctaccgacgagtttcatgccgagtcctttgtgcgaggaaaaatatcagtatggctcaatgatccaaataaagataatgcatccagctggtcattcttagcagcactttccgcatcacgctaacatggctgaaatggtcggagtaaaccgccacctgggcgtagatgccgtcgggtaaggcatcgatatcatcgttagggtccagttcaatggttcccagcacaccgtccgtgccgggcacgaccgttaaactttgcaataccccctgcgcctgataagaaccgcctggcacgacaggtaaaatactagtcagtttgccgtgaaacacctgcccaggtagcgcgttaaacaccacttccgcatcatcgccaggtttcagacgtaacaggctgttttgccgaaattgggcgacaatttgccgtttttgctcggggatgaagaccatcaccggacgcagcggcaaggcagctgcgtatgtacctgggcggatcagtacctgagtaacgtagccattgctcggcgcgcgaatgacagtctgctcaaggttatattttgcttcagtaagttgcgctcttaagctcacaatctggctttgctcgccgttaaccatactgtcgagctggctctggatctgcgcctgctccgccacgctgcctttcaccagcgcatcctgcgcgaggaaattttgccgcgcatcgtcgatgtcacgttcgctgaacggattcaccgccgcctggctgcctttcaagtaacgttgataatttttaaacagacggtcgcgctccgcactaacctgggtggtgttggcctgcgcttcagtgagctgcgcacgcagcgtctttatattatgcgtcgccgtcatcaggtcagcctgaagtctgtcaactcgcgcctggtaacgaaccgggtcgagcttaaaaagcacctcgcccttttgaataagctgattattcttgtcagtgacttcagtaacaattcccgtcacctgtggcgtgatagggatcgctatcactgccttttgcgcggtaaaagtgtaagggtggttgtagttcatcaacaaaatcaaaccactcaccagaaacacgcctcccagcgccgccgtcgccagcgtccactgatttaccggaatgcggaagattttaaagaccgcccacgccagcgccacgtaagttaaaacaatcaatagatccataattagatctccgggaacgtggaatagtcagtctttttctcggcggcgagttgatgctccaaccgggaaattcggtcagaaagtgcggcgatttccgggtcagtcgctttctcctggctcgcaacatgactctgcataccccagccacgctccggttgatagagcgtcgcccagatccacagaaacggccagataacatgcagagtaaacaggctcacccagcccgccgtatgaatagcgtcggcatggggatggttgcgctttttggcaatcagataagggatgtcatgtatcgcgatgattccataaaaaatcaccagaaagacgaagatcagcactcccaacgcgaaatagtttagaaacatatctgcctcggattcacgtttatcagtgttgtttttgggctggcagccagaagggagtcaggctgatattttgacaataatccgggttcgcgattctcgccataacaccaaagaataatttttagaggtgatgagttgcttagttacataacgattgtatgacgaaggcataacatgctgtagatcacatcaggtgaacgccgtaagaaaatatcttgtgattcagatcacaaagattcaacaaaccatcaaaacaaaaatgtgacactactcacatttaaatgccatttttagcgaaaatcgccgccttgttgcttttttacacaagcgttttgtgatgaacgtcacgtcaattacctctctaccccctatatttatgtgattgatatcacacaaaaggccgtcgactggacagttaaccgattcagtgccagatttcgcagtatctacaaggtccggctacctctgccgccacattaacaaaaaacctcgggcttccagcctgcgcgacagcaaacataagaaggggtgtttttatgagttccgatattaagatcaaagtgcaaagctttggtcgtttcctcagcaacatggtgatgccaaatatcggcgcgtttatcgcgtggggtatcatcaccgcgttatttattccaacagggtggttaccgaacgagacgctggcgaagctggtcgggccgatgatcacttatctcctgccgctgctgatcggttataccggtggtaagctggtaggcggcgaacgtggcggcgtagtcggtgccatcaccaccatgggcgttatcgtcggcgcagacatgccgatgttcctcggttctatgattgcaggtccgctgggcggctggtgcattaagcacttcgaccgctgggtagacggtaagatcaaatccggttttgagatgctggtgaataacttctccgcaggcatcatcgggatgatcctcgctattctggcattcctcggcattggcccgattgttgaagccctgtccaaaatgctggctgcgggcgttaacttcatggttgtccatgacatgctgccgctggcgtctatctttgttgaaccggcgaaaatcctgttcctcaacaacgccattaaccacggtatcttcagcccgctgggtattcagcagtcccatgaactgggtaaaagtatcttcttcctgattgaagctaacccaggtccaggtatgggcgtgctgctggcgtacatgttctttggtcgtggtagcgctaaacagtctgcgggcggtgcggcaatcatccacttcctggggggtatccacgaaatctacttcccgtatgtgctgatgaatccgcgtctgatcctcgcagtcatcctcggcggtatgactggcgtgttcacgctgactatcctgggcggtggtctggtttctccggcatctccgggttctatccttgctgtactggcgatgacaccaaaaggtgcttacttcgctaacatcgcgggtgtgtgtgcggcgatggctgtctccttcgttgtctctgctattttgctgaaaaccagcaaagtgaaagaagaagatgatattgaagcagcaactcgtcgtatgcaggacatgaaagctgagtctaaaggcgcatctccgctgtctgctggcgatgtgactaacgacctgagccacgtacgtaaaatcatcgttgcctgtgacgccggtatgggttccagtgcgatgggcgcaggcgttctgcgtaagaaaattcaggatgcaggtctgagccagatttctgttactaacagcgcgatcaacaacctgccgccagatgtggacctcgtcatcactcaccgtgacctgaccgaacgcgctatgcgccaggttccgcaggcacagcatattagcctgaccaacttcctcgacagcggcctgtacaccagcctgaccgaacgtctggttgctgcccaacgccacacggcaaacgaagagaaagtaaaagacagcctgaaagacagctttgacgattccagtgctaacctgttcaagctaggcgcggagaacatcttcctcggtcgcaaagcggcaaccaaagaagaagcgattcgttttgctggcgagcagctggtgaaaggcggttacgttgagccggaatacgttcaggcgatgctggatcgtgaaaaactgaccccgacttatctgggtgagtctatcgcggtgccacacggtacggttgaagcgaaagatcgcgtactgaaaacgggcgtcgtgttctgccagtacccggaaggcgtgcgcttcggtgaagaagaagatgacattgcccgtctggtgattggtattgctgcccgtaacaacgagcacattcaggttatcaccagcctgaccaatgcactggatgatgagtccgtcatcgagcgtctggcacacaccaccagcgtggatgaagtgctggaactgctggcaggtcgtaagtaatccaatcccaccctctccacatggagaaggtggggttaattgcctgatgcgctacgcttatcaggcctacaggatgcatcacaatttgttgaatttgcacgttcttgtaggccggataaggcgcttacgccgcatccggcgctgcccctctcctcacggagagggtttgggtgagggaaaagcctcaccccagccctctcgggtaaaaacattgatgaaggttaatactatgaaagcattacattttggcgcaggtaatatcggtcgtggctttatcggtaaactgctggcagacgcgggtatccaactgacgtttgccgatgtcaatcaggtggtacttgatgccctgaatgcccgtcatagctatcaggtacatgtggttggtgaaaccgagcaggtagataccgtttccggcgtcaatgctgtcagcagcattggtgatgatgtcgttgatctgattgctcaggttgatttagtcactaccgccgttggcccggttgtgctggaacgtattgctccggcaatcgccaaagggcaggtgaaacgtaaagaacaaggtaatgaatccccgctgaacatcatcgcctgtgaaaacatggtacgcggtaccacgcagctgaaaggccatgtgatgaacgccctgccggaagacgccaaagcgtgggtagaagaacacgttggctttgtcgattccgccgttgaccgcatcgtaccgcctagcgctagcgcaactaacgatccgctggaagtgacggtagaaaccttcagcgaatggattgtcgataaaacgcagttcaaaggcgcactgccgaacatcccaggcatggagttaaccgacaacctgatggcatttgtcgaacgtaaactcttcaccctgaacacgggtcatgctataaccgcgtacctcggaaaactggccggtcatcagaccattcgtgacgcgattctcgacgagaaaatccgcgcggtggtaaaaggtgcgatggaagaaagtggtgcagtattgatcaagcgctacggctttgacgctgacaagcatgcggcgtacatccagaaaattctcggccgttttgagaacccgtatctgaaagatgatgtagagcgcgtaggccgtcagccactgcgtaaactgagtgctggtgaccgtctgatcaagccactgctcggtacgctggaatatggtctgccacataaaaacctgattgaaggtattgccgctgcaatgcacttccgcagtgaagatgatccgcaggctcaggaactggcagcactgatcgctgacaaaggtccgcaggcggcgctggcacagatttccggtcttgatgccaacagcgaggttgtatccgaggcggtaaccgcttataaagcaatgcaataatggtggaccaggcgcaggacaccctgcgcccgaataacagattgagtgatatgcaggcaacaatggaacaaacccaggcctttgaaaaccgtgtgcttgagcgtctgaatgctggcaaaaccgtgcgaagctttctgatcaccgccgtcgagctcctgaccgaggcggtaaatcttctggtgcttcaggtattccgcaaagacgattacgcggtgaagtatgctgtagaaccgttactcgacggcgatggtccgctgggcgatctttctgtgcgtttaaaactcatttacgggttgggcgtcattaaccgccaggaatacgaagatgcggaactgctgatggcattgcgtgaagagctaaatcacgacggcaacgagtacgcctttaccgacgacgaaatccttggaccctttggtgaactgcactgcgtggcggcgttaccaccgccgccacagtttgaaccagcagactccagtttgtatgcaatgcaaattcagcgctatcaacaggctgtgcgaagtacaatggtccttagtctgactgagctgatttccaaaatcagcttaaaaaaagcctttcaaaagtaagcaacgtctgcttactgcccctctacctgcttcggccgataaagccgacgataatactccagacgttgtagatataacggcacgctttcatcgggtattccggacggaatcgcgttacggggaggaagttttttcagatactcccggaacgcctggctacttgccatgaaatctacggctttatcgataagaagcggaacgttttcacctaatttgcccatgatgatatctccgtattaccccgcgccgggaatgcgcggccgccaattttagtttaggttcccggtaaagatgacattaaggaaaacgtgctgaatcctcaataatcatccgctgctgtttattatcttttttctatagatttcttaattaatcaacgaattgcgcagtttttgagcatgttaatgattacgttacagaactattacaatgtcattagttgtgaacaaagcacctggtcgcgcatactaggggctataaatttatctttatcagaagccatcacatgaaagaagtcgaaaaaaacgaaatcaaacgcctcagcgatcgcctggacgccatccgccaccagcaggccgatcttagcctggttgaagccgcagacaaatatgccgagctggaaaaagagaaagccacgctggaagcagaaattgctcgcctgcgtgaagttcatagccaaaaactgagtaaagaagcacagaagctgatgaagatgccattccagcgcgcaattaccaaaaaagagcaggctgatatgggcaagctgaagaaaagtgttcgcggactggtcgttgtgcacccaatgaccgcactgggccgcgaaatgggcctgcaggagatgactgggtttagtaagaccgcgttttaagaacacagtatctacagggtgattctgcacattcctataggccgagtaaggtgttcacgccgcatccggcaagataaggcgctctggatcaacaacctaagggcaattctctgatgaggattgcccttttctttaccagacatctccccccacaagaattggccctaccaattcttcgcttatctgacctctggttcacaatttcccaattaaaactcacatcaatgttgccaatacataacatttagttaaccattcattgtcattatccctacacaacacaattggcagtgccacttttacacaacgtgtgacaaggagatgagcaacagactcattacacgatgtgcgtggactccaggagacctgcaatgaatctctggcaacaaaactacgatcccgccgggaatatctggctttccagtctgatagcaagccttcccatcctgtttttcttctttgcgctgattaagctcaaactgaaaggatacgtcgccgccagctggacggtggcaatcgcccttgccgtggctttgctgttctataaaatgccggtcgctaacgcgctggccagcgtggtttatggtttcttctacgggttgtggcccatcgcgtggatcattattgcagcggtgttcgtctataagatcagcgtgaaaaccgggcagtttgacatcattcgcagctctattcttagcataacccctgaccagcgtctgcaaatgctgatcgtcggtttctgtttcggcgcgttccttgaaggagccgcaggctttggcgcaccggtagcaattaccgccgcattgctggtcggcctgggttttaaaccgctgtacgccgccgggctgtgcctgattgttaacaccgcgccagtggcatttggtgcgatgggcattccaatcctggttgccggacaggtaacaggtatcgacagctttgagattggtcagatggtggggcggcagctaccgtttatgaccattatcgtgctgttctggatcatggcgattatggacggctggcgcggtatcaaagagacgtggcctgcggtcgtggttgcgggcggcagctttgccatcgctcagtaccttagctctaacttcattgggccggagctgccggacattatctctagcctggtaagtctgctctgcctgacgctgttcctcaaacgctggcagccagtgcgtgtattccgttttggtgatttgggggcgagtcaggttgatatgacgctggcccacaccggttacactgcgggtcaggtgttacgtgcctggacaccgttcctgttcctgacagctaccgtaacactgtggagtatcccgccgtttaaagccctgttcgcaagcggtggcgcgctgtatgagtgggtgatcaatattccggtgccgtacctcgataaactggttgcccgtatgccgccagtggtcagcgaggctacagcctatgccgccgtgtttaagtttgactggttctctgccaccggcaccgccattctgtttgctgcactgctcagcattgtctggctgaagatgaaaccgtctgacgctatcagcaccttcggcagcacgctgaaagaactggctctgcccatctactccatcggtatggtgctggcattcgcctttattagcaactattccggactgagtagtacactggcgctggcactggcgcacaccggtcatgcattcaccttcttcagcccgttcctcggctggctgggggtattcctgaccgggagcgataccagttctaacgccctgttcgccgcgctgcaagccaccgcagcacaacaaattggcgtctctgatctgttgctggttgccgccaataccaccggtggcgtcaccggtaagatgatctccccgcaatctatcgctatcgcctgtgcggcggtaggcctggtgggcaaagagtctgatttgttccgctttactgtcaaacacagcctgatcttcacctgtatagtgggcgtgatcaccacgcttcaggcttatgtcttaacgtggatgattccttaatgattgttttacccagacgcctgagtgacgaggttgccgatcgtgtgcgggcgctgattgatgaaaaaaacctggaagcgggcatgaagttgcccgctgagcgccaactggcgatgcaactcggcgtaagtcgtaatagtctgcgcgaggcgctggcaaaactggtgagtgaaggcgtgctgctcagtcgacgcggcggcgggacgtttattcgctggcgtcatgacacatggagcgagcaaaacatcgtccagccgctaaaaacactgatggccgatgatccggattacagtttcgatattctggaagcccgctacgccattgaagccagcaccgcatggcatgcggcaatgcgcgccacacctggcgacaaagaaaagattcagctttgctttgaagcaacgctaagtgaagacccggatatcgccagtcaagcggacgttcgttttcatctggcgattgccgaagccagtcataacatcgtgctgctgcaaaccatgcgcggtttcttcgatgtcctgcaatccagtgtgaagcatagccgtcagcggatgtatctggtgccaccggtttttagtcaactgaccgaacaacatcaggctgtcattgacgccatttttgccggtgatgctgacggggcgcgtaaagcaatgatggcgcaccttagttttgttcacaccaccatgaaacgattcgatgaagatcaggctcgccacgcacggattacccgcctgcccggtgagcataatgagcatagcagggagaaaaacgcatgattatttccgcagccagcgattatcgcgccgcagcgcaacgcattctgccgccgttcctgttccactatatggatggtggtgcatattctgaatacacgctgcgccgcaacgtggaagatttgagtgaagtggcgctgcgccagcgtattctgaaaaacatgtccgacttaagcctggaaacgacgctgtttaatgagaaattgagcatgccggtggcactggctccggtgggtttgtgtggcatgtatgcgcgtcgtggcgaagttcaggcagccaaagcggcggacgcgcatggtattccgtttactctcagcacggtttccgtttgcccgattgaagaagtcgcgccagccatcaagcgcccaatgtggttccagctttatgtactgcgcgatcgcggctttatgcgtaacgcgctggagcgagcaaaagcagcgggttgtagcacgctggttttcaccgtggatatgccgacaccgggcgcacgctaccgtgatgcgcatagtggtatgagcggcccgaacgcggcaatgcgccgctacttgcaagcggtgacacatccgcaatgggcgtgggatgtgggcctgaacggtcgtccacatgatttaggtaatatcagtgcttatctcggcaaaccgaccggactggaagattacatcggctggctggggaataacttcgatccgtccatcagttggaaagaccttgaatggatccgcgatttctgggatggcccgatggtgatcaaagggatcctcgatccggaagatgcgcgcgatgcagtacgttttggtgctgatggaattgtggtttctaaccacggtggccgccagctggacggtgtactctcttccgcccgtgcactgcctgctattgcagatgcggtgaaaggtgatatagccattctggcggatagcggaattcgtaacgggcttgatgtcgtgcgtatgattgcgctcggtgccgacaccgtactgctgggtcgtgctttcttgtatgcgctggcaacagcgggccaggcgggtgtagctaacctgctaaatctgatcgaaaaagagatgaaagtggcgatgacgctgactggcgcgaaaagcatcagcgaaattacgcaagatagcctggtgcaggggctgggtaaagagttgcctgcggcactggctcccatggcgaaagggaatgcggcataatcgtttgcgccccctcaccctaaccctctccctcagggagaggggaccgttcggcgctgtatgtactccctcactctgaaacgacaccgcactctttttttctccctcgcccctccggggagagggccggggtgaggggaaaaggccgcactgctcaccaattttctgctatcctgcccccgcactaagggggcagtatgctaaacatcgtactttacgaaccagaaattccgccaaatactggcaacatcatccgtctttgcgctaataccggctttcgtctgcatatcatcgaaccgatgggatttgcctgggacgataagcgcctgcgccgcgcggggctggactatcacgagtttaccgccgttacgcgtcatcatgactatcgcgcgttcctcgaagcagaaaatccccagcgcctgttcgccctcaccacgaaaggtacacctgctcacagcgccgtaagctatcaggatggcgattatctgatgttcggcccggaaacacgcggcctgccagcgagcattcttgatgccctgcccgctgaacaaaaaattcgcattccgatggtgccggacagccgcagcatgaatctgtccaatgcggtgagcgtagtggtgtatgaagcctggcggcagttggggtatccgggagcggtattgagagattaattactgtaggccggatagatgattacatcgcatccggcacgatcacaggacattagatcccatccccatactcaaatgtatggttaataccgttgaaatgctggtccatatccatacttggcttatcgctgtctggtttaccgacaatacgagccggaacgccagcggcggtggtatgcggcggcaccggttgcagcaccacggaacctgcgccaatcttcgcgccgcgcccaacttcaatattgccgaggattttcgcgcccgcgccaatcatcacaccttcacgaattttcgggtgacggtcaccaccagatttacccgtaccgccaagcgtcacagattgcagaatgcttacgtcgttttcaatcaccgccgtttcaccaacgacgatgcctgtcgcgtggtcaagcatgataccgcgaccaatttttgctgccgggtgaatatcgacctggaacgtcacagaaacctggttttgcagaaagattgccagtgcgcgacgcccctgattccacaaccagtgaccgatgcgataggcctgcaaggcatgaaaacccttcaggtataacaacggggtactgtatttatcgactgccgggtcgcgggtacgcaccgcctgaatatcacaggccgcagaggcgatcatttccgggtcagcggcgtaggcttcttccaccacttcacggatagcaatagcaggcataattgggctactcagcttgttcgccagcatgtagctcagtgcactgccaaggttttcgtgcttgagtagcgtcgcgtggtaaaaactggccagcattggctcacagtccgccagcgttctggcttcggctttaatattgttccagacaatttccagttcttcacagctcattgcttactccacacgatgagataatgaccggcccgttctgcgcgggccgggtcatagcggtaacaaaggttccctggggttagtggctgctgcgctcgtccttgcgtgcacgacctagtaaagtcaatgctgcctcgcgcgcgttttttccgcaatataatacttgataaatttcctcggttattggcatttcaacgccgaagcgatgcgccagttcgcggacttctttcgtattgcggtagccttccaccacctgaccaatcttctcctgcgcgctttgtacatccatgccctgaccgagcatcatgccaaaacggcggttacggctctggttgtcggtacaggtaagcaccagatcgccaagccccgccatgcccataaaggtggcagggtcggcacccagcgccgcaccaagacggctcatttcagccagcccacgggtgatcagcgccgtacgcgcattcgcaccaaaaccgataccgtcggacatccccgcaccaatggcaataacgtttttcaccgcgccgccaagctgcacgccaatgaaatccggattgctgtaaacgcggaaacttttgccgcagtgcagcagctgctggagatcatcggcaaaggtctgatcggtgctggccaggctaatagctgtcggtaaacctgccgccagttctttcgcaaacgttgggccagagataaccgccagcggaatttgatcgcctaaggcctcacgcgccacgtcctgtaacagacgtccggtttccgcttccagccctttggtcgcccacaccagacgcgcatcaggacgcatcagtggtttaatctggcgcagcacttcaccaaagacatggctgggtacgacgacgagaatattacggctggctgccagcgcagtggcgagatcgctttcaagatggagcgtatcgggaaaaggcacatcggggagaaacgcggcgttacagcggtcgcgttcaagcgttgcgatatgttcagggtcatggccccagaggacaacctcgtggccatttcttgccagggtgatggcaagagcggtgccgtagctgccggcaccgatcacagtcatactagcattacgttggttcatcaggcatcctgatgttcttcagtaccttcgccagcctgctgctgcaaatagttcatgaacagcgcatcgaagttaaccggcgcaaggttcagttgcgggaatgtaccgcgggataccatgctggtgatgcactcacgagcatacgggaacagaatgttcgggcagtatgctcccaggcaatgcgccatctgggtgccttcgatacccgcgatggagaaaataccgccctgctgaacttcacacaggaacgcggtttcttcgcccaaagaggccgttacggtaacacgcagtaccacttcgtatacgtcatctgccagttgggaagatgccgtatccagatcaagtttaacttctggttgccaatctttctggaaaacgtgcggcgcgttcggcgcttcgaaagagatatccttggtataaatacgttggatctggaaagtcatttcagtgttgttttgttcactcatgtgtagaaaacccttaagtgttgtccttaaatactgcgcaatgtaatgccaacgttcacacgttatttcagcaggggatccagtccaccacgtgcatccaatgcatacaagtcatcacagccgccaatgtgctgtgcgtcaataaaaatctggggaaccgtggtgcgaccgctgcgtttgatcatctcttcacgcttggcggcgttgccatcgatcggcagctcctggaaactcacgcccttgctgctcagcagtgcttttgcacgatggcaatacgggcaggtttctttggtatagatttcaacattggccataaattagctcctgtttttttaccctgaaatttcatgttgcagggcggcagcaaaatggagtgtccccagaagcttataacaataagtcgctgggggcctaattgcagctaacggcctgcatcatgaaagacgacaggtaaattatttgccgcgcaccaaaggcaagttttcgccagcccagccagcgacgccttctttcagcacgaatacttgcgcaaaaccagctttcgtcagtgcgtttgcaggctcctggcactgcatgccagaaccgtctaccacgataaccggtttgtctttgtgcttctcaagctcaccaacattgttggctttgatttcgctcggcaacagattaatagaacctgcgatatggcctttacggaagtcatcacgctgacgtaaatccacaaccacagcgtcttctttgttgatcagacgcgtagcttcaccacgagtaatcaccttcactttgctggtcaggctcttaaacgtagtcacaagaaccgccaccagtaacgcgatccaggcgatactcagtatgggatgacggccaacaaattgcataatttcttgcatggggggtaacaactcccgacgtagtgattaaaaaaaccaggaaaggagtatacctgcgcggtgcggcaaatacagccagcgcgttaactggaatgcaattttgcggggcgcgacgaaaaaaaagcgtaaatctggcatcggcttgccgcgagcggtcgtatattttgatcttcagaggctattttatcgattcagctgtagtaaaattacgcaaattttgactcttgagtatgaggttgtcgcaatgttggtttctaaaaaacctatggtactggtgattctggatggctatggctatcgcgaagaacagcaggataacgccatttttagtgctaaaaccccggtaatggatgcactgtgggccaatcgtccgcataccctaatcgacgcttccggtctggaagtcggtctgcctgaccgtcagatgggtaactccgaagtaggccacgttaacctgggtgccggccgcatcgtgtatcaggacctgactcgtctggacgttgaaatcaaagatcgcgctttctttgctaatccggtgctgactggcgcggtagataaagcgaaaaacgcaggcaaagcggtacacattatgggtctgctctccgcaggcggcgtacacagccacgaagatcacatcatggcgatggtagaactggcagctgaacgcggcgcagaaaaaatctacctgcacgcattccttgacggtcgcgacactccgccgcgcagtgctgaatccagcctgaaaaaattcgaagaaaaatttgccgcgctgggcaaaggccgcgtagcgtccatcattggtcgttactacgcgatggaccgcgataaccgttgggatcgcgtagaaaaagcttatgacctgctgactctggcgcagggcgagttccaggccgataccgccgttgctggtttgcaggctgcttatgctcgcgacgaaaatgatgaattcgtgaaagcgaccgttatccgtgctgaaggtcagccagacgcggcaatggaagacggcgatgcactgattttcatgaacttccgtgctgaccgcgcgcgtgaaatcactcgtgctttcgtgaacgctgatttcgatggcttcgcgcgtaagaaagtggttaacgtcgatttcgtgatgctgaccgaatacgccgctgacatcaaaactgcggttgcttacccacccgcttccctggttaacaccttcggcgagtggatggcgaaaaacgacaaaactcagttgcgtatttccgaaaccgaaaaatatgcccacgttactttcttcttcaacggtggcgtagaagagagcttcaaaggcgaagatcgcattctgatcaacagtccgaaagtggctacctacgatctgcaaccggaaatgagctccgcagagctgaccgaaaaactggttgcggccatcaagagcggcaaatacgacaccatcatctgtaactatccgaacggcgacatggtaggtcacaccggggtgatggaagcggcggttaaagcggttgaagcgctggatcactgcgtggaagaagtcgcgaaagcggttgagtccgtgggtggacaactgctgatcaccgctgaccacggtaacgctgagcagatgcgcgatccggcaacgggtcaggcacacacggcacacaccaacctgccagttccgctgatttacgttggtgataagaacgtgaaagcggttgaaggcggcaaactttctgacatcgcgccgaccatgttgagcctgatgggtatggaaatcccgcaagagatgactggtaagccgctgttcatcgtggaataatccctccccatgaggggaaaggcgattaataccatgacacgggccgtgaaaccgcgcaggtttgcaatcaggcccatcatctacgccagcgttcttagcgctggcgtattgttgtgcgccttttccgcccacgcggatgagcgtgaccaactcaaatctattcaggctgacatcgccgcaaaagagcgcgcggtacgccaaaagcaacaacaacgcgcaagcctgctcgcacaattgaaaaagcaggaagaagcgatctctgaagccacccgtaagctgcgcgaaacgcaaaacacgctcaatcaactcaataaacagattgatgagatgaacgcgagcattgccaaactggagcagcaaaaagccgcccaggagcgcagcctcgccgcacaactggatgccgcattccgtcagggcgagcataccggtattcagctgattctcagcggtgaagaaagccagcgtggacagcgtttacaggcttatttcggctatctcaaccaggcgcgacaagaaaccattgcccagttgaagcaaacgcgtgaagaagtcgccatgcagcgtgctgaactggaagagaaacagagcgagcaacaaacgctgttatatgagcagcgcgcccaacaggcgaaactgactcaggcgctgaacgagcgtaaaaagacgctggcagggctggagtcttccatccagcaaggtcagcaacagttgagcgagctgcgcgccaacgaatcccgtctgcgtaacagcattgcccgtgcggaagccgcggcgaaagcgcgtgcagaacgagaagcacgtgaggcccaggcggttcgcgaccgccagaaagaagcgacgcgcaaaggcaccacctacaaaccgaccgaaagcgaaaaaagcctgatgtcccgtaccggtggtctgggcgcgccgcgtggtcaggcattctggccggttcgcgggccgacgctgcatcgctatggcgaacagctacagggtgaattacgctggaaaggtatggttatcggtgcttctgaaggtactgaagttaaagcgattgccgacggtcgggtgattctggctgactggctgcaaggctacggtctggtggtggtggttgagcatggtaaaggcgacatgagtctttacggctataatcagagcgcactggtgagcgttggtagccaggttcgcgcgggccagccgattgcactggtgggcagcagtggcggtcagggtcggcctagtctctatttcgaaattcgccgccagggtcaggcggtcaatccacagccgtggttgggaagataagttttgtttccatttcgtcgtaacgttcttgcatttgccgctctgttggcgctctcctcccccgtacttgctggcaaacttgccatcgtcattgatgattttgggtatcgcccgcacaacgaaaaccaggtgctggcgatgccttccgctatctccgtcgctgtattacccgatagtccgcacgccagagagatggcgaccaaagcgcataacagcgggcacgaagtgttgattcatctcccgatggcaccgttgagtaaacagccgctggagaaaaatacgctacgcccggagatgagcagcgacgaaattgagcgcattattcgtagtgcggtcaataacgtgccctatgccgtggggatcaacaaccacatgggcagcaagatgacctctaacctgtttggtatgcagaaagtgatgcaggcgctggagcgttacaatctttacttcctcgacagcgtaaccatcggtaatacccaggcgatgcgcgccgcgcaaggcactggcgtgaaggtgatcaaacggaaggtattcctcgacgatagccaaaatgaagcggacatccgtgtgcaatttaatcgcgcaattgacctggcgcgtcgcaacggtagcaccattgccattgggcatcctcaccctgcaacggtacgcgtgttgcaacagatggtttataacctgccgccagacattacgctggtgaaagccagcagcttgctgaatgaaccgcaggttgatacttctacaccgccgaaaaacgctgtgcctgatgcaccgcgtaatccgttccgtggcgtgaagctgtgcaaaccgaagaaaccgatagaacctgtttatgctaatcgcttctttgaagtattaagcgaaagcatcagccagagcacgctgatcgtttacttccagcatcagtggcaaggctggggcaaacagcccgaagcggcgaagtttaacgctagcgcaaattaattagcgcaaattaaaggcgctacgcgtaatgcgatggtggctccgcgttttgtcgcgccattgccataagcggaaagaccacagtaacgcctggtaaccgaccttcacgctgcgcacattggtaatcaggcgcttatacataccggaagtaaatatctcggcaatcatccgttggcgggtaagaatatccggctctttgcgcaccgcatggcaaacacgcaatgcctcgtaagttatttgctgatgaaattccggataaatcataattttgtcggcataatttcgatttaatttctccagcaggcgggtaatcttaatatagtgacgttgataattaaggtttttattcccttgtctatgcaaccgactcacactcgtattatgcagataatatttatataaactttgctcggtatatcgcgcacgcagcgcgttaaacatgaattctgttgtccagacaatatcctgatgatgtaatccggcaataaatttaatgttatttttaacaataacatcacggcgataaacccccatccagacaacgtgagtccaacggcggctagaaagccccatccgcagccagtccgggccggttaatacgccggtactgcgaaggcgatcggtggggatggattgccaggtttctcccgtttcacgaaaacaccagtcagcgttgcactgcgccacgtcgaggtcgtcctctaacgccatggtcatcagcgtttcgtacatggtgggatagacttcatcgtcagcatcgacaaaagcgacatatttgcccgttgccacttcaatcccacgattacgcgccacgcttgcgccagcattcgcctgatgcaacaaacgaacgtgcggatagttttctgcgtaatactttgctatttcaacagaattatccgtactaccatcgttaataataatgatttccagagcagtccaggtttgcgtaattaaagattccatacaagtgcggaaatcatcgcccgcattatataacggaataataacactaagtttattggtgctgttcatcataaattaccgacgacctctgaagttatcctgacgttttacaggctttgtattaagaaactattaagcctgtgagatattatttttacaggtgagagagtcacttcagggtagagagataatgagagcagctatataagagatcagcacaattacgaactctttattacactgacaggattttacatatttaacagattatcctcagataaaagggctggaataccagcccttgttcgtgttaatcccagctcagaataactttcccggactggccgctacgcatagcgtcaaagcccttctggaaatcatcgatagagaaacgatgggtaatgatcgggctaagatcgaggccagactgaatcagcgccgccatcttgtaccaggtttcaaacatctcacgaccgtaaatacctttaatgaacaagcctttaaagatcactttggtccagtcgatagacatatcagacggcggaatacccagcatcgcaatacggccgccgtgattcatggtgtcaagcatggtacgaaacgctggcggcgcaccggacatttccagaccgacatcaaaaccttcggtcatgcctaactccgccatcacgtcattgagattttctttggcgacgttaaccgcacgggtgatacccattttacgcgccagctcaaggcggtattcgttaacatcagtgatcaccacattgcgtgcaccaacgtgtttcgccaccgccgctgccataataccaatcgggcctgcaccagaaaccagcacatcttcgcccaccagatcaaagctcagcgcggtatgcacggcgttaccgaagggatcaaaaattgcggctaagtcatcggaaatattgtcggggattttgaaggcgttgaatgccgggatcaccagatattcggcaaagcagcccgggcgattaacaccaacgcctatcgtgttgcggcacaaatgggtacgaccaccacgacagttgcggcaatgaccacaggtgatatggccttcgccagaaacgcgatcgccgatcttgaagcctttcacttcctgaccaatacctaccacttcaccgacatattcatggcccacgaccatcggcaccgggatggttttttggctccactcatcccagttatagatgtgaacgtcagtcccgcagatggctgttttacggattttaatcagcagatcgttatgcccgagttccggtacaggaacgtcggtcatccagatgccctcttccgctttcagtttggataacgctttcatctcacatcctcaggcgataacgcccagttgtttaccaatacgcgtaaatgcttctactgcacgcgtaatttgctcaggggtatgcgccgcagacatctgggtacgaatacgcgcctgacctttcggaacgaccggatagaagaaaccggtaacgtaaatgccctctttttgcagctcacgggcaaatttctgcgccactaccgcatcaccaagcatgaccggaataatggcgtgatcggctcccgccagggtaaagcccgccgcgctcatttgctcacggaactgacgcgcgttcgcccacagacggtcacgcagttcgctgcccgcttcgaccatctccagtactttgatggacgcggcaacaatggccggtgccaggctgttggagaacaggtacggacgagaacgctggcgcagccactcaaccacttctttgcgcgccgcggtataaccaccagaagccccgcccagcgctttaccaagcgtaccggtgataatatcgacccggcccatcacatcgcagtattcatgggaaccacgaccattttcaccgacaaaaccgaccgcgtgggagtcgtctaccatcaccagggcatcatatttatctgccagatcgcaaacgcccttcaggttggcaatcacgccgtccatactgaacacaccatcggtggcgatcagcacatgacgcgcaccggcttcacgcgcttctttcagacgtgcttccagctcctgcatatcgttgttggcatagcgatagcgtttagctttgcacagacgcacaccatcaataatagacgcgtggttcagtgcgtcggagataatggcgtcttccgcacccagaagcgtttcaaacaggccaccgttagcatcaaagcaggaagagtagagaatcgcatcttccatccccaggaaggccgccagtttttgttcaagctctttatggctgtcctgagtgccgcaaataaaacgcacgctagccatgccgaaaccgtgagaatccattcccgcctttgccgccgcaatcagatcaggatgattcgccagcccgagatagttgttggcacaaaagttaatgacgtggcttccatcagccacagtgatatctgcttgctgcgcagacgtaataatgcgctcttctttaaacaacccttccgcccgtgcggtttccagatcgttggttaactgctgataaaattctccacgcattgcgattctccagacagggcaaattccagcacatattacccaaacttataggtcgcgacgagataacgcgttaacacttctgcaaaattcaggataaataacgtgtaacttgatgtctctcaacacctacagatagtagaaaaactgtacagttttggctgggcataatgatgattgattttactgcattgatataaaaagaaaaaatgatgccaaagcatcatttttcctatctcagttggtatcaaaacgctacccactaatggagggaaacttattttctactaaggaaaattctcagcgcctgcatttttgcccctaaagtgttactcctgaagcagcgaaacaaatcgaaccattttcctctccccagatagtttaggttgaagagatcggggcgtttgtaatagcacatgacaaaaatgccctggtcatcgtccacaatgttattatttagtgttattttttgactttccagaactaatttatagaattctttccatttatgctgactaccaacaattgcgcccccaataatatatacatgattgccaatcatgaaatcaaaaacctgttgttgagatgtgacagtaagccctttttttatagtgaaaagatgcatcttactttcatcaaatgggaaatcccaaattttcaatcctcgagttacatttggcttatggcaatagccaaaatctatccacgcaacaagaggcgttttcactaagcccatgttgatagctttatttacaaaataggccttaaggttacataccaaaacatactctggactccagtactctgggttttttaattgtcgaggctcaagtctatttgtaaagctctcatctttttgaattttttcgatacgacttctgatatatctaaatttcttttttatatcgataacgataaccgttgttggttttccgttgcgaatcgcttcaacccttggtttcaaatcgggagaagtgaaaataatcatctcattttcaagtgcggccagacgctcaaagtaactaaaataaacatcaacactacgagctagtttttcacggaaccctttattagcagtccaatcccctctaccaatgtcaaaatatgcagtgataattgtggtggaacttttcattactaataagaccattaatataaaaaaagaattatatcataaatattaatagaatgtatactgtatattatccattcaaatgcttccgttatttatcatacatcggaatattgatactaaagcactattcacatgcaaaaccaacatccgccatgaaggactagctaaaacccaaactagtttgttgcaattagcatccttgcacctctatgtaaagggctgaagggattcggatgtgatggtatgattacagacattcgtgtctgagattgtctctgactccataattcgaaggttacagttatgatcatcgttaccggcggcgcgggctttatcggcagcaacatcgttaaagccctgaatgataaaggcatcaccgatattctggtggtggacaacctgaaagacggcaccaagtttgtgaacctggtggatctgaatatcgcagactatatggataaggaagacttcctgatccagattatggctggcgaagagttcggcgatgtcgaagcgattttccacgaaggcgcgtgctcttccaccaccgagtgggacggcaagtatatgatggataacaactatcaatactccaaggagctgctgcactactgcctggagcgtgaaatcccgttcctgtacgcttcttccgcagccacctacggcggacgcacctccgactttattgaatcccgcgagtacgaaaaaccgttgaacgtctacggttacagtaaattcctgtttgatgaatatgttcgtcaaatcctgcctgaagcgaacagccagattgttggcttccgttatttcaacgtttatggaccgcgtgaaggccataaaggcagcatggcgagcgtcgctttccatctcaacacccagcttaacaacggtgaaagtccgaagctgtttgaaggtagcgagaacttcaaacgcgacttcgtctatgtgggcgacgtggctgatgtgaatctgtggttcctggaaaatggcgtttccggcatcttcaatctcggtactggtcgtgcggaatccttccaggcggtagctgatgctacgctggcttatcacaagaaaggccagatcgaatacattccgttcccggataaactgaaaggccgctatcaggcgttcactcaggcagatctgacaaatctgcgcgcggcgggttacgacaaaccgttcaaaaccgttgctgaaggtgtaacggaatacatggcctggctgaatcgcgacgcataagagctctgcatgaaaatactggtgatcggcccgtcttgggttggcgacatgatgatgagccaaagtctctatcgcacgctccaggcgcgctatccccaggcgataatcgatgtgatggcaccggcatggtgccgtccattattaagccggatgccggaagttaacgaagctattcctatgcctctcggtcacggagcgctggaaatcggcgaacgccgcaaactgggtcatagcctgcgtgaaaagcgctacgaccgcgcctacgtcttacccaactccttcaaatctgcattagtgcctttcttcgcgggtattcctcatcgcaccggctggcgcggcgagatgcgctacggtttactcaacgatgtacgcgtgctcgataaagaagcctggccgctaatggtggaacgctatatagcgctggcctatgacaaaggcattatgcgcacagcacaagatctgccgcagccattgttatggccgcagttgcaggtgagcgaaggtgaaaaaagttatacctgtaatcaatttagccttagtagtgaacgtccgatgattggtttttgcccgggtgcggagtttggtccggcaaaacgctggccacactaccactatgcggagctggcaaagcagctgattgatgaaggttatcaggtggttctgtttggcagcgcgaaagatcatgaagcgggcaatgagattcttgccgctttgaataccgagcagcaggcatggtgtcggaacctggcgggggaaacacagcttgatcaagcggttatcctgattgcagcctgtaaagccattgtcactaacgattctggcctgatgcatgttgcggcggcgctcaatcgtccgctggttgccctgtatggtccgagtagcccggacttcacaccgccgctatcccataaagcgcgcgtgatccgtttgattaccggctatcacaaagtgcgtaaaggtgacgctgcggagggttatcaccagagcttaatcgacattactccccagcgcgtactggaagaactcaacgcgctattgttacaagaggaagcctgacggatgcgggttttgatcgttaaaacaagcagcatgggcgatgttctccatacgttgcccgcactcactgatgcccagcaggcaatcccagggattaagtttgactgggtggtggaagaagggttcgcacagattccttcctggcacgctgccgttgagcgagttattcctgtggcaatacgtcgctggcgtaaagcctggttcagcgcccccataaaagcggaacgcaaagcgtttcgtgaagcgctacaagcagagaactatgacgcagttatcgacgctcaggggctggtaaaaagcgcggcgctggtgacgcgtctggcgcatggcgtaaagcatggcatggactggcaaaccgctcgcgaacctttagccagcctgttttacaatcgtaagcatcatattgcaaaacagcagcacgccgtagaacgcacccgcgaactgtttgccaaaagtttgggctatagcaaaccgcaaacccagggcgattatgctatcgcacagcattttctgacgaacctgcctacagatgctggcgaatatgccgtatttcttcatgcgacgacccgtgatgataaacactggccggaagaacactggcgagaattgattggtttactggctgatagtggaatacggattaaacttccgtggggcgcgccgcatgaggaagaacgggcgaaacgactggcggaaggatttgcttatgttgaagtattgccgaagatgagtctggaaggcgttgcccgcgtgctggccggggctaaatttgtagtgagcgtggatacggggttaagccatttaacggcggcactggatagacccaatatcacggtttatggaccaaccgatccgggattaattggtgggtatgggaagaatcagatggtatgtagggctccaagagaaaatttaattaacctcaacagtcaagcagttttggaaaagttaagtagtttataaaggtaaaacatgctaacatcctttaaacttcatagtttgaaaccttacactctgaaaagtagtatgattttagagataataacttatatattatgtttttttagtatgataattgcattcgtcgataatactttcagcataaaaatatataatatcactgctatagtttgcttattgagtctaattttacgtggcagacaagaaaattataatataaaaaaccttattcttcccctttctatatttttaataggcttgcttgatttaatttggtattctgcgtttaaagtagataatagcccatttcgtgctacttaccatagttatttaaatactgccaaaatatttatatttggttcttttattgttttcttgacactaactagccagctaaaaagtaaaaaagagagtgtattatacactttgtattctctgagttttctaattgctggatatgcaatgtatattaatagcattcatgaaaatgaccgcatttcttttggtgtaggaacggcaacaggagcagcatatagtacaatgctaatagggatagttagtggcgttgcgattctttatactaagaaaaatcatccttttttatttttattaaatagttgcgcggtactttatgttctggcgctaacacaaaccagagcaaccctactcctgttccctataatttgtgttgctgcattaatagcttattataataaaagtcccaagaaattcacttcctctattgttctactaattgctatattagctagcattgttattatatttaataaaccaatacagaatcgctataatgaagcattaaatgacttaaacagttataccaatgctaatagtgttacttccctaggtgcaagactggcaatgtacgaaattggtttaaatatattcataaagagtccttttagttttagaagtgcagagagtcgcgctgaaagtatgaatttgttagttgcagaacacaataggctaagaggggcattggagttttctaacgtacatctacataatgagataattgaagcagggagtctgaaaggtctgatgggaattttttccacacttttcctctattttagtctattttatatagcatataaaaaacgagctttgggtttgttgatattaacgcttggcattgtggggattggactcagtgatgtgatcatatgggcacgcagcattccaattatcattatatccgctatagtcctcttactcgtcattaataatcgtaacaatacaattaattaagaataaacaagtttaagaagtgagttaaaactcacttcttatctatacaacttaatctctttacactattagttaaagtttcagtatcgatatcttttaccgtatatgttggggatactatttgtatagatttatgatgattcggggaccaaattaaatggctgggatattccggagtacgactattagggtaaaatgcaagcgttggtttatgataagccgcagcgatatgaacaagagctgtatcaacagaaatgacaaaatcactatacttggtcaacgcaacggtataaataaactcatcaaatggtagtgtttcgatttcaagtattggtattgtcaataaatcttgcggtaacccggtaaatataatccgataattttcaaagtgtgttttcacttcttgatatataacttttatttgctcaaacgtaagacggcatattttttttgcacctaatggattaataatgactattcttgtatctccaataaattcttttattttatcttcaacatctactggtaaatgcaagtcgtagttggtggaaaatttaccctcaccataaatatgcttcagtatttctattgctcgtgtactcatatgttcttttaaacattcatcgtggggatggtaaaaactatagtaacgcttataccaatgatcaaaacccagaatgtaagaatcttttaaactacttaatattaagctatgcttaaaactgggcatagtttcaaaggggtctaatacaatatcgaactgtaaatcccgcagatgcttacatagagtaagcatttcaagaaaaccggtactttctttaatacagaactcaaatatatttttattattagagagaaattccccaccctttctatttgtgagaagagttattttaacccctttactataaagttcacgataaatgctacttaatacaattagatcaccaagtttattattatcatgaataataaggcaacttttaacttgtgctggatctgtaatttgattatttattttattacgaaataaaaaagaaaggaaattaatcttgattttgtttatataaaatcttttctttttgtgaaaagttcctaagcgcatttttataccatattattttagtttcaggatgattaattagcataagaatcggtactagttctatattgcattttttttcttgtcatatctttactttcttctgcactgatgtcttgaagtttaataaatggaattacatcgtaagaaatagctgtatcatcacttaaattataaatattaatatcttttacattatcatgcataaaacgaaaaaatggcaatattttgaataaatccctacttaattcgctgggcatgggatttttattctcatcatagaaacgagaacagctacccgttaaatcaagaccagaacaaataatccgcgcatacttaagactatatgcgatttgaattgcagcaaaggcaatagtatggcaactgcaataaccaagactaatgtccttgcaaaatccaaccagacgaccttttttagacaacggtacagagatcagcagttctttgtgaatctgtctcaaaatattaaatttaatcttctttataaaaccacctttttcccgacggtaaaaggaccgtaatacgaggcagttctggaggatataaagtttatcttctttggaagcgtgttcataaacgtcaacgtttactatggtataacgacttctctggctaaatttataaaaatcatcacgacgctgatgtaaaaatcggacatctgtaagtacatatataaaaggaacgatattattacttaacagatattgcgcagaaccattgacagcaataatatcctttgttcgtaatacactcaaaggtgttttttggcttgtagggccgctaagaaaaataataacatcatcagatattttattttcaatcaggttttcaacatcttttttgtcaatgtatctaatattcttcatgataaacctgtgaaataaataactccgcttaaaactgtcctggtgaagacatgtaattgtgggattttttttagcgcgctggtttccctttcaaacgccgcataaaattgcgcatttttttacgatatactaaaagataatagcctagatctctaatctcatttttaataccgtaatgacgctctaagtcaatacgatctttcgctttacgctgcgcactagcacgctttccggagagatcgataattcgaacctcaccattttttataatgaagttaccacgatgggggtcgccagaaaccatgccatgttgatgtaaggcattaatactttgctgaattttattttttagcgcatcatcaatatcgggcatatcacacaactctatgccatcaatatactcgatgatcatgatataagtatggacaaaacgtaaggttttccgttcagccaataaataaaagtcattgagtgtatttaacccttcatttcgtactttttgggtttgctcaaaaaggcgttcgtaataatcaccttttaacagagacttaaagaaacgttcgttacgcttaactttcggagaaaaaaccttaagaatcaatttaccgtaatcggtatcaataagcataacttttgtatcatcaatagaacgaaaaaccttgatgatatttatattataagacaagaagtcatttaatacattgaggtacttactattgttttcatcggtaaaaacaaccaagtctttgatcttgctcttctgaatcataataaaccagttaaatgttatttacggtaatattttcggcaaagataacagactcctgctataattcctgagatataatgatgttgcactaaaagatgtttatatcttttttaaattcaataattgatttcgcatctcgtggagagtcatctttccagggggaattttctaaagctattttatagtattttaccgatggataaattgcccatttgtgccacggtttagttgcacctgtataatgaataagaagagtactttctgtaatcagctttttatagttttgatgtgttttgtcttttaattcacttttaattgtataaattgtattgtactcacgaggcaaaaataatgtcatccctttcagtaagacattcataacatcctgatcagggtatttataaacattatctttactcataagaatagacaacgctttttctgttagttttgcgtcagcccattttcttaagtctaaataaacgacaccggaattaaagtactgcccaagtaattcaggatcagacaacctggataccgccttttcttgcattggctcaacatctttaacaacagcagcaaccgctccatttaaacccagatgtaatagttggctaatatcgcctttacaaacaacatctgcatcaagataaagcaaacgatcaagcgttaaacccaataattgaaatgcaaataaacggaagtacattgctcttgaccagacctgtgtacaaggcaagcactggagcttatcagtgttaattctatataacgtgattcttaattggttttgctctgcaagctttgcaattttttgaaaaaaaccatcattataaacatcagcaataatataaaaatcaagattaatatgtcgattatttaggacaattgatgtgatggaaacacctacaccatcaagataattagcatcgacaccataggcaacatttaaacattcagaagtatttatattagctagccgaaaatcccaggctttaactttatctatctctatggcaggaaatgagtccacaatgctacccttatatcattactttatagtttcccagttttaatgctttatcttttcaataaaataaaaaagatagttgctaaatccttttagatatctatgctttttaagcatatgttttgcgctatatcttaattgattgctattgttcggtttcagcaacgccgtattcttccatgggctagcattttttgcctccataaaggcttgacttacaggataatcccaggcccaatcatgccagggcttggttggcccgatataatggataaaaatagtatcgttggttactgggtttataaagctttctttgagttgataatttaagctgaactgggtgttatatttaatatcagcgaaaataagtttatccgccagcaacatatttaacacatcctgatcaggatgtgttatttttttgattatttctggctcatttagcattgcaatagctcgtgcagaaacctgctgagccgcccattgggcagtattaatcaataaaaaaccggagttaaagtaacctttagcaattcccgcaacacctaagctatgggcgcgtttttcccaccagtcagcttgcccttctgtaacaaccattgcgactttatcgtcaggaaaactgaaattaattagtggctcaatagtcccctgacaaatgatatctgcatccagataaaggactttaggcgccttattaataaagtaatctgcaataacaaaacgaaaatatattgcatgagtccaattcttagtgctaggcaaactgcgcagtcgatcaccattaatcagatatattttaattctggttttatactgcaacgccagggcatcaaaatacttacgatcatcatcaccaaaataatcagtaaaaatatggaaacacaatcgacttccttcattatattttaatatactagcaatgctaattccgcaaccaaatagaaagtttttgtcagttccataagcgatgtccagacaaagattttctgtttctactttatgatcataatcaataacactattaagaaactcagtttcctggaaaaacacctgctgcattatttcctccgggaaatagcagaaataattaccttatgtaatctatcgtaatacttgctttggtaaaattcatcgatgctcgcaggaattttttcatgttcgatatgaatttcacctgctatatatttatttagaagagttacaaaaccagcaatatctcccggttgatacagatggccattgacatcaggttgaataatgtcagcaggcccggagacacaatcggcactgatacaaggaatcccccagctcaaggcttcaagtagggtcattgggaaaccttcaaaagaactcgtgagcaataacgcactcactttttcaatatcttgctggaccaattcccagggatattgttgccaaccataccagacaattcgatcatcaatatttaattctctaccataagcctggcatttttcgaaatcggagccatcacccaatacatggagtttccagttacctttcgcttgacttaagccatcaagcaggtctttaactcttttctggccttcaaatttcatacgcccaacataaataaacgttgccgtttcaccttcctcgggcgcgggaatgacactgtctttagtttcgacgggattaaaaataacatttatcgtgctttctgctacacctcgattaatcatttgctgtttaatgccagagctgattgctaaatgatagtcggcacaggtgatatattcagcatgttttttgtgatctaaagaaaaatgtggccaactaaatactggcatatcaattccactttttttacgtgcttttgcggcaaacaggcaggagatcacatcaatacaaataacgatatctggttggtactcctgaagccatttacttagagcatgaatatgtttcgcccgacgcaaaaaacctaaacgaatattggaaaaactacaactgtatttaataccttccagccatcccttatccattttgtcattacgacaaaagaaaaacatttcactttggatatgttgttgcctgaaggtagtaataacatcacggatgacagtttccatgccgccaaatccagaaacagcttcgccgataaacgctattttcatagaaactctcattaattgagtaaaactcactgttttaacggttttatttgtctataaaatcagaaacaatcgtactcatcattttatctggactgaatttatataaactatcataatccattggtttaacagaactgttaataaaatactctaacttatcccaatcatcatgacctattataaaaaagcgagattcactatagatttcactaccaaatacatttatattattagtaattaattttttattgaaaaatagtgcctcaagtatacgaagagtccagccagattggttttctttggttatatcaacaattatattagcatttaatgttcttctaatattctcttcataagatatttgtttttcaatcaaatacttactagtcgtagaacttgtcttatctttgacaacattaaaatctagcttacatcctagtgttgttaatctctcggctaactcattaattatttgaagacgccctttatcacgaccaaggaaaaaacatattggctggctgttatttttgtcagataaactataatttctaatttcatccattcctataggaaaaaattgttctattgccttgatcttttcattccctataaatctatgctcaaaatcatatataatatcgaaataattcgcgttatcaagaataaaatcttcgccaacagtatttcttagaagcaaaactttatgacagttaatattttttaatatttgtttattgatacctttattaacaacactgtcattaatgataattatgtcatcttttttaatatcattgaggtaatgcttgatgaataatcgccccagccatgcattatccatccctattttacttatttttttattaatccagttatatttttttggtgttgttatattttttatcttgtacttttttttcaggtactgaatcatttttaattcataatctgcaacccaatttataaaataaatagtcataataaagttagttccagtacatactaataaatatttttataatcctttgcgttgtgttcgctctttaatacgctcggccttaacgcttgccatgttcaataaattctgttcaagagacaatattttgcgtaaaggcatcccaaaataaaccttcataaatcgccagatatctctttgcgtcaggccaatattcatactactgaaatataaaccaatcaggtctttatcgcgccagcggcgcggtacttttgcacgtatctgtgcccgatgcagatcgataacactaatttttaattcatcttcccggccagtaaatggcaaatgaagcaaaaagtggcaaatgtaacagtcgcggtgatttatccctgcagtatgcattttacgcaccatagttgctacacgtgcgatcagcatacgcttaacacgtatatcaggcgggttgactgcccaatcggcacaataatcttcaaggctaattgtgggagtgagatcttcggtaataataaaacttgcgcgagttaatggatttaaccctttttcgccaaacccaatgcccttcattgtatcaacgccaacatcactcaggcgatgaatagcgtgccactctctgtctgcgcccaaaacgggcatccgcaaactgagtagattttttataatctcttttaatgtcgtccccttgtgccatttaagaaaatagcttttcccggacagttcaaagcgtaatgtacgacgagtctccagttcacgaaagacctcgccgttcagttttttgacctctgcaaaagcatctttaccacgccaaagtgtggcaagcggctcttttaattcaaccatctaaaccacctgtaatgatatccgcggctttttctggcaagctatacaaatcctgagtatcggcataatggcgagcattctccgcccaggccattcgcaatgggctctgagttaacgctttacgtaaaacttcatttaattgttcctgagagaaaggttcagcgatgaccgttccacaattggcatccgcaatataatgcgcgtacccacataccgctgttgttaaaacaggtaacccagcagtgatcgcttctagaagaacgatacccgcggcttcctgataagcgggatgcagtaataaatcagcggctgccattaattcactcacatcattgcgaccgaagaagaaatgcacattgctccgcacgccgagtttttctgccagcgcttcaaattttcgcggcttatcctgaccaacaacaaataaaagcgtattgtgacgtaaactttccggtaagcttgccaaagcttcaatactgcgatctacacctttacggccaaaatcacttccaacctgcagtaataagttttgttgctcttttatgccatttttctggcgataaatttcacggctgtttgggatttgctcactgtattttctgtccggataaataccgggaggaagaatttgaaaacgttcaggttcagtttgataatgcttctggaaatcggcgatttgcttatcggtcagcatcataagtttcgtgcttttaccctgctcgaaagtcgctcgctcaaatgcggcataatggcgatatcgacttgttaaacgatataaaaaacctttttcttgcgcaactttctcggcgtaacaaacatcagcggcaaaataaacatccaggccaggcatcttattaaacccaacaacgcgatctgcgggatgctctttgagatgattttgtacccaggcataatattctgcattgcgtccatggttggtatgggacttaactggcacctgaataagctcaaatgctttcgggcaatcgccttcccagctctgtgtatatacccgaacatggtggccccgtgcggcaactgtacttgcaatgcgcataaagtcacgttgaagcccaccaaatggaaaatatttatataaacaaaacgccacgatcataattgtgcattcctgtcagcactaggggcatcttctggcaacagcttttccgtagcggcgatcacatcctccgctgggataacagaaagatattttttgttgcggtcaagttcatgccgggtcggcattttctgataattccccgcccagaattgaataatattctcggtccagggacgccagaatacgtgatccgttgcaccaaatagactaatgactggcgttttcactgccgctgcaatatgtcccggcgcagaatccacaccaataaaaagcactgcatgatcaattaatgcacccagttcaggaaaacgtgttttacctgcaaggccagtaatgggttttgtttcgcaacctcgtgcaatctcatctacacaagcgagatcatctgcgctgggcccacaggttagcacaacctgatagcctcgctgttgcagcgcatcgataaccttagaaaatttatcgttatcccaacacttaaatatctgacgcgctgtcggttggatgacaacataatgatcttttacgcccagggcatctaattcccggcgcatcttcttccagcaatcttcggcgtaactcattgttgtgtcggtgtagaaatcggtaatacctaatggctcaaggacgcttaaattacgctcaacaatatgtgtaccgtgtattggcgctaagtgtgtgaagctttttttccaaataccatgctgccgatgaccataaagttggcttattttcatccgtgcaggtaaacaacgtaccagcagcgccaccatccactgatccgtaagattaatgaccaggtcataattattcgcacgcagagtttttatcaagctaagcacatttttaattttatcgaaagttcccgcacctttattgcttatcccatagagcgcattaatttccgggttttcagacaaaatagggatggtgtcctgataaagcagcatatcgatttttgcatcaggataattctgcttgagcgtactgatgacaggagtagttaataacatatccccatgatatcgcatctttatgaccaggatttttcgaaatggcttttccactagcgactcttttgtgtgattgtctggttaagttaagcagaaaaaagcacgctaccgccccaggctcaacagctacctgaatactgataacgcacttactttgacgtgctagtgtatcatttctttcgcagcaatccgacccgaatgatttttatacacaaaatatactttaatcataaaaatcaaatagataaaaaatagcatttcgataatgtcagtacggcctatgtagatttgaaaatggggccgagtttcaatgaatcgcataaaaatacaaaaaaaatgaagatgtagcggcagatcagaccaaactgaagctatttaagtcaaaaacgggaaaagtaatggtaaagccacagctaaatacatagaatccccagcacatccataagtcagctatttactatgctcgaattgctttacaccgcccttctctaccttattcagccgctgatctggatacggctctgggtgcgcggacgtaaggctccggcctatcgaaaacgctggggtgaacgttacggtttttaccgccatccgctaaaaccaggcggcattatgctgcactccgtctccgtcggtgaaactctggcggcaatcccgttggtgcgcgcgctgcgtcatcgttatcctgatttaccgattaccgtaacaaccatgacgccaaccggtagcgagcgcgtacaaagcgctttcgggaaggatgttcagcacgtttatctgccgtatgatctgcccgatgcactcaaccgtttcctgaataaagtcgaccctaaactggtgttgattatggaaaccgaactatggcctaacctgattgcggcgctacataaacgtaaaattccgctggtgatcgctaacgcgcgactctctgcccgcagcgccgcaggttatgccaaactgggtaaattcgtccgtcgcttgctgcgtcgtattacgctgattgctgcgcaaaatgaagaagatggtgcacgttttgtggcgctgggcgcaaaaaataatcaggtgaccgttaccggtagcctgaaattcgatatttctgtaacgccgcagttggctgctaaagccgtgacgctgcgccgccagtgggcaccacaccgcccggtatggattgccaccagcactcacgaaggcgaagagagtgtggtgatcgccgcacatcaggcattgttacagcaattcccgaatttattgctcatcctggtaccccgtcatccggaacgcttcccggatgcgattaaccttgtccgccaggctggactaagctatatcacacgctctagtggggaagtcccctccaccagcacgcaggttgtggttggcgatacgatgggcgagttgatgttactgtatggcattgccgatctcgcctttgttggcggtagtctggttgaacgtggtgggcataatccgctggaagctgccgcacacgctattccggtattgatggggccgcatacttttaactttaaagacatttgcgcgcggctggagcaggcaagcgggctgattaccgttaccgatgccactacgcttgcaaaagaggtttcctctttactcaccgacgccgattaccgtagtttctatggccgtcatgccgttgaagtactgtatcaaaaccagggcgcgctacagcgtctgcttcaactgctggaaccttacctgccaccgaaaacgcattgaggttgttatgcaaaaacgggcgatttatccgggtactttcgatcccattaccaatggtcatatcgatatcgtgacgcgcgccacgcagatgttcgatcacgttattctggcgattgccgccagccccagtaaaaaaccgatgtttaccctggaagagcgtgtggcactggcacagcaggcaaccgcgcatctggggaacgtggaagtggtcgggtttagtgatttaatggcgaacttcgcccgtaatcaacacgctacggtgctgattcgtggcctgcgtgcggtggcagattttgaatatgaaatgcagctggcgcatatgaatcgccacttaatgccggaactggaaagtgtgtttctgatgccgagcaaagagtggagctttatctctagtagcttggtgaaagaggtggcgcgccatcagggcgatgtcacccatttcctgccggagaatgtccatcaggcgctgatggcgaagttagcgtaacgtttatgccggatggtatgccatccggcgcgcatgaattacttctggcactgccgacaataaaacgttgcccgctgcgcatgtttagtcgccacaatcggcgtaccgcacacccgacacggctcaccttttcgcccgtaaacctgcaattcctgagcgaaatagcccggtttaccatcactttgcagaaaatctttcagcgttgtaccaccctgctcaatgctacgcagcaacaccgctttaatcacccgagctaacaattcacactctgccaggctcagactactcgccagccgatccggatggatccccgccgcaaacagactttcgctggcatagatattccctacccctaccaccagcttgttatccatcagccacggtttaatcgccgtttttttcttcgcgcacttctgatgcagatactcaccattgaaatcgtcgctaagcggctccggtccaagatgggtcagcacattatgcccttccagctctttggtccacagccaggcaccaaagcggcgcggatcggtgtagcgcagcactttgccgttgctcatcaccaaatccacatggtcatgcttttcagggggaagttcttctggaaggatgcgcaggctgccagacatccctaaatgaatgataatccagccctcaggcagctccagcagcagatatttagcccgccgctgcacgctaagcactggttggtcgcttaaacggtagatctcttcactaaccggccagcgcaagcgtccgttgcgcaccactgcatgaagaatggttgcaccaacgagatgcggttctatgccgcggcggctggtttcaacttcgggtaattcaggcatagcatctccaggaatgaacagatgcagtcaatatgggggcaagcagataacaaaaaaccccgccggagcgaggttttttgttacatcaaagcgagaattatttgattttcgcttctttgtagatcacgtgctggcgaacaactggatcgaattttttcagttccagtttttccggcttagtacgtttgttcttcgtagtggtatagaagtgaccagtaccagcagaagaaaccagcttgattttctcacgaatacctttagccatgatttatttcctctaagtacttagtacttttcgccacgggcacgcagttcagccagaactgtatcgatgccttttttatcgattacacgcatacctttagcagatacgcgcagggtgacaaaacgcttctcgctctcaacccagaaacggtgagagtgcaggttcggcaggaaacggcgtttagtcgcgttcagtgcgtgggaacggttgttaccggtcaccggacgcttgccagtaacttggcagactcgggacatgtctattctccaaaaatcaaattagctcgagcttcgtatggggtattggcgcctcgtcaggctttacagcccggtcatcgcagttctatgtgaactctcgattgccaggcccaaatgccaaacccgagattctcaaaggtggcgtagtatacgctgactcagcgatgtgctcaagtcccgaacagacaaagatcccgaaggatcgcgcatagcgggttaaatccagccgcgttcggcaaaagaaacatactctccacgcccaatcacgatatggtcgagcacgcgtaaatccatgaactgacaactctttattatccgttcagtaatgagtttatccgctttactgggttcagcacaaccgctagggtgattatgtgcaaggatcagcgcgctggcgtttatttttatcgcttcgcggataatttcccgaggatggacttcaacatggtttagcgtgccggaaaaaagacgcctatgcgttataacccggtgttgggagtcgagaaagatcaccataaagatctcccgctcctcacccgtgagctggctttgtaaaaattccctcgtcatctccgggctgagtaaagggctttcttcacgcatccgcacgttgtagtaacgccgcgccagttcagcaatcccctttaactgggcaaatttcgccacgccaattccatgaacgccactaaattgttcatattcagaggttaacaagccataaagagagccgaaattctccagcatctcttttgccagggttaatacatctttaccgcgcgttccggtacgcagaaatagcgccagcagctcgacatccgttaaggcgctaataccaaacttcagcattttttcgcgcggcatcaacagctgactattgtttttcaccttcacctcctttgtggtgctcgcatcctgtcatagccgtttcgttaaatcgacggccagttttcaatcctggaaagcgcctcgcaaagtgaatctcaggtgaaggcacgacaacaaaagtattgtgataaaatcgccaacttctggtgtcaccctacaggaaaaatcatcatgagcctggccggtaaaaaaatcgttctcggcgttagcggcggtattgctgcctataaaacccctgaactggtgcgtcgtttgcgcgatcgcggggccgacgtccgcgtagccatgaccgaagcggcaaaagcctttatcaccccacttagcttgcaggcggtttctggttatcccgtttccgacagtctgctggacccggcagccgaagccgctatgggccatattgagctgggtaaatgggctgatttagtgattctcgcccctgccacggcagatttgattgcccgtgttgctgccggaatggcgaatgacctggtaagcacgatttgtctggctacacctgcgcctgtagccgtgctccccgccatgaaccagcagatgtaccgtgccgctgccacgcagcataatttagaggtgcttgcttcccgtggtttgctcatctgggggccagacagtggcagtcaggcttgtggtgatatcggtcctgggcgaatgctcgatccgttaaccattgtggatatggcggtagcgcattttagccccgtcaacgacctgaaacatctgaacattatgattaccgccggcccgacgcgtgaaccgctcgatccggtgcgttatatctctaatcacagctccggcaagatgggttttgctatcgccgccgccgctgcccgtcgtggcgcgaacgtcacgctggtaagtggtccggttagtctaccgacgccaccgtttgttaaacgtgttgatgtgatgaccgcgctggaaatggaagccgccgtgaatgcttctgtacagcagcaaaatatttttatcggctgcgccgccgtggcggattatcgcgcagctaccgtggccccagagaaaatcaaaaagcaggccacgcagggtgatgaattaacaataaaaatggttaaaaaccccgatatcgtcgcaggcgttgccgcactaaaagaccatcgaccctacgtcgttggatttgccgccgaaacaaataatgtggaagaatacgcccggcaaaaacgtatccgtaaaaaccttgatctgatctgcgcgaacgatgtttcccagccaactcaaggatttaacagcgacaacaacgcattacaccttttctggcaggacggagataaagtcttaccgcttgagcgcaaagagctccttggccaattattactcgacgagatcgtgacccgttatgatgaaaaaaatcgacgttaagattctggacccgcgcgttgggaaggaatttccgctcccgacttatgccacctctggctctgccggacttgacctgcgtgcctgtctcaacgacgccgtagaactggctccgggtgacactacgctggttccgaccgggctggcgattcatattgccgatcctagtctggcggcaatgatgctgccgcgctccggattgggacataagcacggtatcgtgcttggtaacctggtaggattgatcgattctgactatcagggccagttgatgatttccgtgtggaaccgtggtcaggacagcttcaccattcaacctggcgaacgcatcgcccagatgatttttgttccggtagtacaggctgaatttaatctggtggaagatttcgacgccaccgaccgcggtgaaggcggctttggtcactctggtcgtcagtaacacatacgcatccgaataacgtcataacatagccgcaaacatttcgtttgcggtcatagcgtgggtgccgcctggcaagtgcttattttcaggggtattttgtaacatggcagaaaaacaaactgcgaaaaggaaccgtcgcgaggaaatacttcagtctctggcgctgatgctggaatccagcgatggaagccaacgtatcacgacggcaaaactggccgcctctgtcggcgtttccgaagcggcactgtatcgccacttccccagtaagacccgcatgttcgatagcctgattgagtttatcgaagatagcctgattactcgcatcaacctgattctgaaagatgagaaagacaccacagcgcgcctgcgtctgattgtgttgctgcttctcggttttggtgagcgtaatcctggcctgacccgcatcctcactggtcatgcgctaatgtttgaacaggatcgcctgcaagggcgcatcaaccagctgttcgagcgtattgaagcgcagctgcgccaggtattgcgtgaaaagagaatgcgtgagggtgaaggttacaccaccgatgaaaccctgctggcaagccagatcctggccttctgtgaaggtatgctgagtcgttttgtccgcagcgaatttaaataccgcccgacggatgattttgacgcccgctggccgctaattgcggcacagttgcagtaatatgacgccggatgacttttcatccggcgagtttctttaaacgccaaactcttcgcgataggccttaaccgccgccagatgttccgccatttccggcttctcttccaggtaagcaatcaggtctttcagggtgatgatagagatcactttgcagttgtaatcacgctcaacttcctgaatcgcgctaatctcgccgcgcccgcgttcctgacgatcgaggctaatcaacacgccagcaagcgtcgcgccattggcctgaataatctccatgctctcgcgaatcgccgttccggcggtgatcacatcatctaccagcattacgcgtccttgtaacgcgctaccaaccagattgccgccttcaccgtggtcttttgcttctttgcggttaaagcagtacggcaggtccaggtcgtgatgctccgccagtgccacagcggttgtggtggcaatcgggatccctttgtaagcagggccaaacagcagatcgaactcaatgccggaatccaccaacgcttcagcgtaaaaacggcctaacagtgccagatcgcgcccggtattaaacagcccggcgttgaagaaataggggcttttgcgcccggatttcagcgtaaactcgccaaactttaacacctgcttgctaagcgcaaattcaataaactggcgctgatatggtttcatgccttcgctcctcatcttacttttctacagacaaaaaaaaggcgactcatcagtcgccttaaaaatcagtttgccagcgccgccttctgcgtcgttacaatggattgctttcccctcgggccagagccaacaagatgagtagctcttcatgggtgaacggctcgccttctgccgtcccctgcacttcaatgatgcgcccgtcttcggtcatcactacgttcatgtcggtctctgcggcagagtcttcaacgtattccagatcgcaaaccgcttcgccgttcacaattccgacagaaactgcggctaccatccctttcatcggattggttttcagcttgccgttttccaccagcttctgtagcgcatctaccagcgccacgcaggcacccgtaatgctcgcggtacgcgtgccaccatcagcctgaagcacgtcgcagtccagcgtaatggtgaactcacccagcgctttcaaatctactgccgcgcgaagagcacgggcgatcagacgctggatttccattgtgcgtccaccctgcttacctttcgccgcttcacgagcgttacgggtgtgggtagaacgtggcagcatgccgtactctgcggtgatccagccctggccctgacctttcaggaagcgcggcacgccttcttcaatagaggcggtacacaacactttggtatcgccaaattcgaccagcacgctgccttctgcatgttttgtatagttacgagtcagggtaacgggacgcacctgattattgctacggcctgctggacgcatattgaaatctccggcttgaaacaaatgtggctgcgcattatacggacttccggcggttattcctatcctgacaaggcatcgatggctataatccttccacctctccttttataaacaggaacgtctatgatccgcagtatgaccgcctacgcccggcgtgaaatcaagggtgaatgggggagcgcaacctgggaaatgcgcagcgtaaaccagcgttatctggaaacttactttcgtctgccggagcagttccgtagccttgaacctgtcgttcgcgagcgtattcgttctcgcctgacgcgcggtaaagtggaatgtaccctgcgctatgagccagatgttagcgcgcaaggtgagctgatcctcaacgaaaaactggctaaacagctggtaactgccgcgaactgggtaaaaatgcagagtgacgaaggggaaatcaacccggttgatattctacgctggccgggcgtgatggcagcccaggagcaggatcttgacgccattgccgctgaaattctcgcggcgctggatggtacgctggacgactttattgtcgcgcgcgaaaccgaaggtcaggcactgaaagcattgatcgagcagcgtctggaaggcgtcaccgccgaagtggtcaaagtccgctcccatatgccggaaatcctgcaatggcagcgtgagcgtctggtcgcgaagctggaagatgctcaggtgcaactggaaaacaaccgtctggagcaggaactggttctgctggcacaacgaattgacgttgccgaagaactggatcgcctcgaagcgcatgtcaaagagacctacaacattctgaagaaaaaagaagcggttggtcgtcgtctggattttatgatgcaggagttcaaccgcgagagcaacactcttgcgagcaagtctatcaatgccgaagtgacaaactccgccatcgagctgaaagtgttgattgagcagatgcgcgagcagattcagaacatcgaataactcgtaacgccaattcttacttttccgccttcacaaatgccgccactcaaacagagcggcatttttcttccccgcaacattcaattctgttttgcgtgcctgctccagattttgcgatgtttttttgcccagcacactgagaacgcgagatactcacaactgtatataaatacagttacagatttactttctttgcaattgatatcacatggagtgggcaatgaacgaacatcatcaaccttttgaagagataaaactgattaatgcaaacggagcagaacaatggagtgcaagacaacttgggaaactactgggttatagtgagtatcgtcactttatacctgtattaacgcgcgccaaagaagcctgtgagaacagtggtcacacaattgatgaccatttcgaggagatcctcgatatggtcaaaattggcagtaatgccaaaagagcattaaaagacatcgtactctcccgctatgcctgttacctggtagtacaaaacggcgaccctgcgaaaccggtcattgcggcagggcagacttattttgctatccagacccgacggcaggagcttgctgacgatgaagcatttaagcaacttcgtgaagacgaaaagcgtctgtttctgagaaatgagttgaaagaacataacaaacaattggttgaggcagcacagcaagctggggtagcgacagctactgatttcgccatatttcagaatcatggttaccaggggctgtatggtggattagatcagaaagctattcatcagcggaaggggctgaaaaagaatcagaagatcctggatcatatgggtagtacagaactggcggctaatctctttcgagctacccaaacagaagaaaaactcaagcgggatggcgtgaatagtaaacagcaagcaaacaccacacactttgacgtgggtcgcaaggtgaggcaaaccattcaggaacttggcggaaccatgcctgaggagttgccgaccccgcaggtcagcatcaagcagttggaaaacagtgtaaaaattacagagaagaaataacagaaactaaaaactctttttgttgattgagacacccgatgcgtaagccaaggtccaggtgcagtgaacacaatggctaaatattgcacctttcttttccccctcagttttaacctattttttcttatgcattttctcagacaagaagtcagaagaatgcatctctgctacagaaaatagcgatttcacataactacaagttatcaatttcccctccccttaaaaaatctcaatcgtgacaatgcgcacaaatcgctaccctgccagacagatttttagggagagaaccatgctgttatacattttgtatttggttggcattactgccgaagccatgacgggggcgctggcggccggacgacggcgcatggatacatttggcgtaattattattgcgaccgccaccgcaattggcggagggagtgtgcgcgatattctgctgggccactatccgctcggctgggtcaaacacccggaatatgtgattatcgtcgctaccgccgcagtactcaccactatcgttgctcctgtaatgccttacctgcgcaaagtgtttctggtgctcgatgcgctcggactggtggtcttttctatcatcggggcacaggttgcactggatatggggcacggcccaattattgccgttgtcgcggcggtaaccaccggcgtgtttggcggcgttttgcgcgatatgttctgtaaacgtatcccactggtattccagaaagagttgtatgccggtgtcagttttgcctccgccgtgctgtacatcgcgctgcaacactatgtttctaaccatgatgtggtaattatctccaccctggtattcggcttttttgcccgcttactggcgctacgccttaagctgggattaccggtcttttactacagccacgaaggacattaaggttcaaaacctgtgatctgctgggcagccagccaactgcccagcttcttgatttgcgcattttccttccattcaataacctgtctggcgcgtccgcttccagtccccggcagctgctgccagaactgctccgtgctaaataaaagttggctccaggaccgttcatcactggcattaagcgccgcccgggttagcggtattcccattgccatcacccagcgagtaaaaggctgcttacgagccagattaaactgatgccatagctgcgcacttttacttttcgcgatccccggcgtgttctgtaattgctctggcgttaataaaagccaggaaaagatatgttcaaagcgatgagtctgatgcagcgcgcgccaaccggcctcaccaatgccatccagcccaagaacctgttttgcccccagccagactaagcgactaatgaactgttcctgacaaacatcagaagcaaagtagcaggtcaagctgttaaagcggttttctggcggtgtcggttttgtacgttctgcaccgcgccacaccacatcatcaatgcgaggaataccctgaccggcaaggctgacgagaatctgatcaccaggcgcaatatcccactcctgccagcgcctgacggaaccaatattcacccgctggacttttttatcatccagcatgacaggtgcgagactcgcaaccacgcttattttaccgctcttacccaccgcaaactgaattgccttcacttcggcaacctgagctacaggttgatatttccaggccaccagccactctgcctggcccggtagccaatggcgggattctggctctttcgccgctcgtacaactacgccatcggtgacgaagggtaattccgctttccaccactcattgcgtacgcgcgcaacttcatcagcatttttcaccgcacgggtatacgtctgcgttagagtaaaacctgcggtagccagctcttttaaacgatcagacattaactgcggtccatccggccatgcccagacaaaaacgcccagagaattcagcgtgtcgctatcgtcctggcgcatcatcaagccagcaacttttgcgcgggcatttattccccccatttgttgttggatatgcccctcgcgctggagaaatatttccccctgaagcgtactgttggctaaaggcccgctaacggtttgcggcacagcggaaattaagctaactttctgcgtccagtcctcgcctttcaggccattaccgcgactgattgctttgttcagtttcccgtcccgataaaccagggttaccgcaacgccatcaacttttggctgcacccaaagatcgctacgttctcgcatccacagacttaatgcgtttttatccaccattttgcgtacacccgtatgggcaaccggatgcataaccgcaccatttaaaggcggcatcatcacgtcgcggggctcgctcccaaagcagcgttgccactgcgtaagacgggcgcttaactgatcgtaaacaccgtcttccacctcactttttccttccttccagtagtcatcgtcccactgttttatttgctgttgcaggcgggaaatttcttcctgtgctctggctgggctccaggccggacagaccgcccacacagaactttgccagcacaagatacctattaatatcgccatccatactttcatcatcacctccgctgtagatagtcaggcagatatacaacgtgatgaaagcaaagccgagtggcaaaaacggagtctgcgaggacgcttcctgaaaatcgtctttattgcagtgaatgacaggcaaatgcggaagcagctacgcaaaacgcaacaactttgcgcaaaaagtgtgagcaagggctacgtcacatggccgcgccgtgtataataagctcgtatgtaggctttatttcgctaatcacatacgaaagatactcatggctcaaggcacgctttatattgtttccgcccccagtggcgcgggtaaatccagcctgattcaggctttattaaaaacccaaccgttgtgtgacacccaggtttctgttagtcacaccacacgccaaccgcgtcctggtgaagtccacggtgaacattatttctttgttaatcatgatgaatttaaagaaatgattagcagagatgcgttcctcgaacacgcagaagtttttggtaattactatggcactagccgtgaggccattgagcaagtactggcgaccggtgtcgatgtttttctcgatatcgactggcagggcgcgcagcaaattcgccagaagatgccgcacgcgcggagtatctttattttaccgccgtccaaaattgaactggaccgccgtctacgcggtcgcggtcaggacagcgaagaggtcattgcaaagcgtatggcgcaagctgttgcagaaatgagccattacgccgaatatgattatctgattgtgaatgatgacttcgataccgcgttgaccgatttgaagaccattattcgcgccgaacgtctgcgcatgagccgccaaaagcagcgtcatgacgctttaatcagcaaattgttggcagactgaacctgatttcagtatcatgcccagtcatttcttcacctgtggagctttttaagtatggcacgcgtaactgttcaggacgctgtagagaaaattggtaaccgttttgacctggtactggtcgccgcgcgtcgcgctcgtcagatgcaggtaggcggaaaggatccgctggtaccggaagaaaacgataaaaccactgtaatcgcgctgcgcgaaatcgaagaaggtctgatcaacaaccagatcctcgacgttcgcgaacgccaggaacagcaagagcaggaagccgctgaattacaagccgttaccgctattgctgaaggtcgtcgttaatcacaaagcgggtcgcccttgtatctgtttgaaagcctgaatcaactgattcaaacctacctgccggaagaccaaatcaagcgtctgcggcaggcgtatctcgttgcacgtgatgctcacgaggggcaaacacgtagtagcggtgaaccctatatcacgcacccggtagcggttgcctgcattctggccgagatgaaactcgactatgaaacgctgatggcggcgctgctgcatgacgtgattgaagatactcccgccacctaccaggatatggaacagctttttggtaaaagcgtcgccgagctggtagagggggtgagcaaacttgataaactcaagttccgcgataagaaagaggcgcaggccgaaaactttcgcaagatgattatggcgatggtgcaggatatccgcgtcatcctcatcaaacttgccgaccgtacccacaacatgcgcacgctgggcagtcttcgcccggacaaacgtcgccgcatcgcccgtgaaactctcgaaatttatagcccgctggcgcaccgtttaggtatccaccacattaaaaccgaactcgaagagctgggttttgaggcgctgtatcccaaccgttatcgcgtaatcaaagaagtggtgaaagccgcgcgcggcaaccgtaaagagatgatccagaagattctttctgaaatcgaagggcgtttgcaggaagcgggaataccgtgccgcgtcagtggtcgcgagaagcatctttatagcatttactgcaaaatggtgctcaaagagcagcgttttcacagcatcatggacatctacgctttccgcgtgatcgtcaatgattctgacacctgttatcgcgtgctgggccagatgcacagcctgtacaagccgcgtccgggccgcgtgaaagactatatcgccattccaaaagcgaacggctatcagtctttgcacaccagcatgatcggcccgcacggtgtgccggttgaggtccagatccgtaccgaagatatggaccagatggcggagatgggtgttgccgcgcactgggcttataaagagcacggcgaaaccagtactaccgcacaaatccgcgcccagcgctggatgcaaagcctgctggagctgcaacagagcgccggtagtagctttgaatttatcgagagcgttaaatccgatctcttcccggatgagatttacgttttcacaccggaagggcgcattgtcgagctgcctgccggtgcaacgcccgtcgacttcgcttatgcagtgcataccgatatcggtcatgcctgcgtgggcgcacgcgttgaccgccagccttacccgctgagccagccgcttaccagcggtcaaaccgttgaaatcattaccgctccgggcgctcgcccgaatgccgcttggctgaactttgtcgttagcagcaaagcgcgcgccaaaattcgtcagttgctgaaaaacctcaagcgtgatgattctgtaagcctgggccgtcgtctgctcaaccatgctttgggtggtagccgtaagctgaatgaaatcccgcaggaaaatattcagcgcgagctggatcgcatgaagctggcaacgcttgacgatctgctggcagaaatcggacttggtaacgcaatgagcgtggtggtcgcgaaaaatctgcaacatggggacgcctccattccaccggcaacccaaagccacggacatctgcccattaaaggtgccgatggcgtgctgatcacctttgcgaaatgctgccgccctattcctggcgacccgattatcgcccacgtcagccccggtaaaggtctggtgatccaccatgaatcctgccgtaatatccgtggctaccagaaagagccagagaagtttatggctgtggaatgggataaagagacggcgcaggagttcatcaccgaaatcaaggtggagatgttcaatcatcagggtgcgctggcaaacctgacggcggcaattaacaccacgactagcaatattcaaagtttgaatacggaagagaaagatggtcgcgtctacagcgcctttattcgtctgaccgctcgtgaccgtgtgcatctggcgaatatcatgcgcaaaatccgcgtgatgccagacgtgattaaagtcacccgaaaccgaaattaatgttttatgaacccaacacgttatgcacgcatctgcgaaatgctcgccaggcggcagcctgatctgaccgtctgcatggagcaggtccacaaacctcataacgtttctgcgattattcgtaccgcagatgccgttggcgtacatgaagttcacgccgtctggcctggtagccgcatgcgcaccatggctagcgcagcggcgggtagtaacagctgggtacaggtgaaaacacaccgcaccattggcgatgccgtcgctcatctcaaaggccagggcatgcagattctggcaacccatctttctgataacgctgtcgatttccgcgaaattgattacactcgcccgacctgcattttgatgggacaggagaaaacgggcatcacgcaggaagcattggccctggcggatcaggacatcatcattccgatgatcggcatggtgcagagcctgaatgtttccgttgccagtgccctcattctttacgaagcccagcgtcagcggcaaaatgcaggcatgtacctgcgtgaaaacagcatgttgccggaagcagagcaacaacgcctgttgtttgaaggcggctatccggtgctggcgaaagtcgcaaaacgcaaaggcctgccttatccccacgtcaatcagcaaggcgagatcgaagctgatgccgactggtgggctactatgcaggctgcagggtaagtgccatgaaaggtcgcctgttagatgctgtcccactcagttccctaacgggcgttggcgcagcacttagtaacaaactggcgaaaatcaacctgcataccgtgcaggatctactcttacaccttcccctgcgctacgaagatcgcacccatctctaccccatcggagaactactgccgggcgtttatgccacggtggaaggcgaagtgctgaactgcaatatctccttcggcggtcggcggatgatgacctgccagatcagcgacggttccggcatcctcaccatgcgctttttcaatttcagcgcggcaatgaaaaatagcctggcggcgggccgccgtgtactggcttatggcgaagcaaagcgcggtaaatatggtgcggagatgatccacccggaataccgcgtgcagggcgatctcagcacgccagaattacaggaaacgctcacgccggtttatccaacaacggaaggcgtaaagcaggccacgctgcgtaaattaaccgaccaggcgctggatctgctcgacacctgcgccattgaagaactcctgccgccggaactgagtcaaggaatgatgacgctaccggaagcgttgcgcactttgcaccgcccgccaccgacgctacagcttagcgatctggaaaccgggcagcatccggcgcaacgtcgtctgattctggaagaactgctggcgcacaacctcagcatgttagccttacgtgccggagcacagcgttttcatgcccagccgctgagcgccaatgacacgctgaaaaataaactcctcgccgccttaccgttcaagccaacgggcgcacaggcacgcgtagtggcggagatcgagcgcgatatggcgctggatgtgccgatgatgcgtctggtgcagggcgatgtaggttccggtaaaacgctggtcgccgccctcgccgcgttgcgtgcgattgcccacggcaaacaggtagcattgatggcaccaaccgaattactcgccgagcagcacgccaataacttccgcaactggtttgcaccgctcggtatcgaagtgggctggctcgccggtaagcagaaaggtaaagcacggctggcacagcaggaagccatcgccagcggtcaggtgcagatgattgtcggtacacacgccatcttccaggaacaggtgcagtttaacggcctggcgctggtgattatcgacgaacagcatcgttttggcgtgcatcagcgtctggcattgtgggagaaaggccagcagcagggcttccatccgcatcagttgatcatgaccgccacgccgatcccccgcacgctggcaatgactgcgtatgccgatctcgataccagcgtgatagatgagctgccgccaggccgcacgccagtgactacggtcgctattcctgatacccgccgtaccgacatcattgaccgcgtgcaccacgcctgcataactgaaggtcgtcaggcatactgggtttgtacgttgattgaagagagcgaattgctggaagcgcaggcggcggaagctacctgggaagagttgaaactggcgctaccagagttgaacgttggcctggtacacgggcggatgaaacctgccgagaaacaggcggtgatggcgagctttaaacaaggtgagctacacctgctggttgccacaaccgttattgaagtcggcgttgatgtgcctaacgccagtctgatgattatcgaaaacccggagcgtctgggtctggcgcagttacaccagctgcgcgggcgcgtaggtcgtggcgcggtggcttctcactgcgtgctgctctacaaaacgccgctttctaaaacggcgcaaattcgcctgcaagtgctgcgcgacagtaacgacggttttgtgattgcgcaaaaagatctggagattcgcggccctggcgaattgttaggcacgcgtcagacgggtaatgctgaatttaaagtggcggatttactgcgcgatcaggcgatgatcccggaagttcagcgcctggcacgccatattcacgaacgttacccacaacaggcaaaagccctgatagaacgctggatgccggagacggaacgttacagcaatgcgtaaaaggcggcagtgagaagaccgccatttcaggttaccctaccttcctgccggatgcgattcatcaccctacaaattcaataaattatgaatcaatacgcaggcttgataagcgaagcgtatcaggcatttgtctttgttgcggcggcacttctaccgccgcttcatcggttaaccggcaaaaatcggcaacatcaaatacaacttaattaccagcgcattgacgatatcgataaagaacgcaccgaccatcggcaccaccaaaaacgccatgtggcccgggccaaagcgttcagtgatcgcctgcatgttggcgattgccgttggcgttgcaccgaggccaaaaccacagtgacccgcagccagcactgccgcatcgtagtttttgcccatcatgcgccaggtaacgaagatggcatacaacgccatgaagatggtctgtaccaccagaatcgccagcatcggcagcgccaggctagccagctcccacagtttcagccccatcaacgccatcgccaggaacaagctcaagcttacgttacccagcacggataccgcacgctcaaagacgcggtaaaagcccattatactcagaccgttgctcagaatcacgccaacaaacagtacacagacgaaggtcggcagttcaaaagcagtgccagccaaaagttgcgcaacaattttccccaccgtcaggcagatagcaatcagcgcgatagtttcaatcagcaccaagctggtgatcatgcgtcccacatccggcttttcaaacgccgtcgggacttcctggtcatccggaataccgttcggcgtggtggagtgtttcaccagatagcgcgccaccggaccgccaatcaagccgcccagcaccagaccgaacgttgcacaggccatcgccacttccgtcgcattggtgaagccataacgttcaatgaacaatttactccacgcagcgcccgtaccgtgaccgccggaaagagtaatagaaccggccaacagccccatcagcggatcaagccctaacaagctagccataccaatgccaatggcattttgcatcaccaacagaccaacaaccacaatcaagaagatgccaaccacacgcccaccggcacgcaaactggcaatgttggcgttcaggccaatggtggcgaagaaagccagcattaacggatcgcgcagggacatatcaaagttgacttcccagcccatgctttttttcagtactagtagcgccagcgccaccaacaaaccacccgcaacaggttccggtatggtgtatttcttcaaaaaggagacggaatggaccaacttacgcccgagcagcaacgtcagcgttgcggcaacaagcgttgctaaagtatcgagatgaaacatagttactcctttgtatccgcatcactctttcatactcgtcatacttcatcgcgcagtggcaacttcatgaactatgacgggtatcgagttatgctttcctgggtcaaattctcagctgttaatgaacaaatggcatggattttaagcagaaaaataccaaaagttatataaaaaagtgcatttatctcatttaaatatttagatgaggatgtggcaaacgtttgcttttctctttcggtcagctaaaatgcccgctttgctaccacgggattgttttcgatgtctgtttccaccctcgagagtgaaaatgcgcaaccggttgcgcagactcaaaacagcgaactgatttaccgtcttgaagatcgtccgccgcttcctcaaaccctgtttgccgcctgtcagcatctgctggcgatgttcgttgcggtgatcacgccagcgctattaatctgccaggcgctgggtttaccggcacaagacacgcaacacattattagtatgagcctgtttgcctccggtgtggcaagcattattcaaattaaggcctggggtccggttggctccgggctgttgtctattcagggcaccagcttcaactttgttgccccgctgattatgggcggtaccgcgctgaaaaccggtggtgctgatgttcctaccatgatggcggctttgttcggcacgttgatgctggcaagttgcaccgagatggtgatctcccgcgttctgcatctggcgcgccgcattattacgccgctggtttctggcgttgtggtgatgattatcggcctgagcctaattcaggttgggttaacgtccattggcggcggttacgcagccatgagcgataacaccttcggcgcaccgaaaaatctgctgctggcaggcgtggtcttagccttaattatcctgcttaaccgtcaacgtaacccttacttacgcgtggccagtctggtaattgcgatggcggccggatatgcgctggcgtggtttatgggcatgttgccagaaagcaacgaacctatgacgcaagaactgattatggtgccaacgccgctctattacggtcttggcattgaatggagtctgctgctgccgctgatgctggtctttatgatcactagcctggaaaccattggcgatatcacggcgacctctgacgtttccgaacagccagtgtccggtccgctgtacatgaaacgcctgaaaggcggcgtgctggcaaacggcctgaacagctttgttagcgcggtgtttaacaccttcccgaactcctgcttcgggcaaaacaacggagtgatccagttgactggtgttgccagccgctatgtcggttttgtcgtcgcgctgatgttgatcgtgctgggtctgttcccggcagtgagcggttttgtacaacacattccagaaccggttctgggcggcgcaacgcttgtaatgtttggcaccatcgccgcctccggtgtgcgtatcgtttctcgtgagccgctgaaccgtcgggcgattctgattatcgcgctgagcctggcggttggtctgggcgtgtctcagcagccgctgattttgcagtttgcccctgaatggctgaaaaacctgctctcctccgggatcgccgcgggcggtattactgccatcgtgctgaatctgattttcccaccagaaaaacagtaattcactggcggcggtaagataattaccgccgcagtctcacctctttaaccattcccgccttgaggattgcgcgtaaatcgtgcataactcccttatgtgcatttcacgggatggaagaccatgaaatttattgggaagctgcttctctacattctcatcgctctgttagtggcgatcgctggcctctattttcttctgcaaacccgctggggagcagaacatatcagcgcatgggtttccgagaatagcgactatcatctggccttcggggcgatggatcaccgtttttccgcgccatctcatatcgtgctggagaacgtcacgtttggtcgtgatggccagcccgcgaccctggtggccaaaagtgtcgacattgcgctaagcagtcggcaactgaccgaaccacgccatgtcgataccatcctgctggaaaacgggacgctgaatctcaccgaccagaccgcgccgctaccgttcaaagccgatcgtctgcaactgcgtgatatggcgtttaatagcccgaatagcgaatggaaactgagcgcgcagcgggtaaatggcggcgtagttccgtggagtccaaaagccggtaaagtgctgggtacgaaggcgcagattcagtttagtgccggaagccttagcctcaatgatgttcctgccaccaatgtactgattgaaggcagtattgataacgatcgcgttacgctgactaacctgggtgccgacatcgcccgcgggacattaaccggaaacgcgcagcgtaacgccgacggcagctggcaagtggaaaacctgcgcatggcggatatacgtctacaaagcgaaaaaagcctaaccgacttctttgcgccattacgctctgtcccgagcttgcagattggtcgcctggaagtgatcgatgctcgtttgcaaggtccggactgggcggtgaccgacctcgatctcagcttgcgcaacatgaccttcagtaaagatgactggcagacacaggaaggcaaactgagcatgaacgctagcgagttcatttatggtagcctgcatttatttgacccgattataaacacggaattttccccgcagggcgtagcgctgcgccagttcaccagccgctgggaagggggtatggtcagaacgagtgggaactggctgcgtgacgggaaaacgttgatccttgatgatgcggcaattgccgggctggaatataccttgccgaaaaactggcaacagttgtggatggaaacgacacccggttggttaaacagcctgcaactgaagagatttagcgccagccgcaatctgatcattgatatcgaccctgacttcccgtggcagctcaccgcgctcgatggttacggtgccaacctgacgctggttaccgatcataaatggggcgtctggagtggcagcgcgaatctgaatgccgccgccgcgacattcaatcgtgttgatgttcgtcgcccgagcctggcgctgaccgccaacagcagcacggtgaatatcagcgaactgagtgcatttactgaaaaaggcattctggaagccaccgccagtgttagtcaaacgccacaacgtcagacacatatcagcctgaatggacgcggtgtgccggtgaatattttgcaacagtggggatggcctgaattaccgttgactggcgacggcaatattcagcttaccgccagtggcgatattcaggccaatgtcccgttgaaacctacggttagcgggcaattgcatgccgtgaacgccgcaaagcagcaagtgactcaaaccatgaatgctggcatcgtttccagcggtgaagttacaagcacggagccggtgcggtaaacatcaatctcgccgggtacgactcagacgtacccggcattccatcaatagattacaacgtaattgtcagcgcattcccttgaggcttcaccaccagcccctgctcactttcagcctggctaccgtcttgcagaccatttactttcacaacattgcgcaggcacagtgtccagttcttcgcctcgcccgcaccagtcacagtaatcgtgttgccagtacgtgctgcttttaaagtaaagatcacgcttccgtcagcagcgggcacttcacagacggcttcatgcccgtcttgcagattgaagaggtggaatgccgtgccttcgtgccacacgtaatcgggacgttgatcgttgttgcccagcgccagtagagtgttatcacgcacataaacgggcagactcaggaagccgtgctgctgtttatgccagcgactaccgtcgagttcatcgttgtgccacaggtgtgtccagcgaccttccggcaggtagaactgcacatcgcccgcttcagtgaacaccggcgcaaccatcacgttgtcgcctaacatgtattgacggtcaaggtaatcacaagccggatcgtccgggaactccatcatcatggcccgcatcatcggcgtaccccgcgcgttcgcacgcgcagcttcacgatacagatacggcatcatgcggcatttcagttgcgtgaagaagcgcaccacatcacaggactcatcatcgtaggcccacggcacacgataagatttgctaccgtgtaaacggctatggctggagagcaaaccaaacgcgcaccagcgtttgtaaacgtgcgccggagcggtattttcaaagccgccgatatcgtggctccagaagccaaaaccactaaggccaatagacaaaccaccgcgcaggctttccgccatactttcgtagttagcgtaacaatcgccaccccagtgtaccgggaatttctgcgcaccgacggaggcgctgcgggcaaacaagacagcttcttcctcaccaacggtgtccttgagcacgttccacaccagttcgttgtagatgtacgcataatggttatgcattttctgcggatcggaaccgtcaaaccactgaacatcagttgggatacgttcgccaaagtcggtcttaaagcaatcaacgcccatcgcgaccagacctttcagtttgtcggcgtaccatttgcaggcatccggattggtaaagtcataaatcgccagacctggctgccatttatcccactgccataggctaccgtccgggcgtttgagtaaatagcctttctcttgtaactctttaaagacgggggatttttgaccgatataggggttaatccagacgcagattttcagtcctttcgctttcaggcggcggatcatcccttccgggtcagggaaagtcagcgggtcccactcaaaatcgcaccactggaaggctttcatccagaaacagtcaaagtggaaaacatgcagcggcagattgcgttccgccataccatcgataaagctgtttaccgtcgcttcgtcgtagttggtggtaaaactagtggttagccacaggccgaaggaccacgcgggcggcagcgccggacgaccagtaaagcgggtataacgatcaagtaccgctttcggcgtcgggccgtcgataacaaagtattcgagatattcactctcaacgctgaactgcactttggagactttctcgcttcccacttcaaaagagacacactggggatgattgaccagtaccccataaccacggttagtcatgtagaacgggatatttttatacgcctgttcagtacttgtgccgccgtcccggttccaggtctctaccgtctggccattgcgcaccagggcagtaaagcgctctcccagaccgtaaactgtttcgccaacgccaagatcaagccgctcaaacatataattgcgttgattattcgtgtcctgcacgtagccattatttttcacctgactaccggtaatacgttcgccgttgcgcagaaaatccagactccagaactcacctttgctgacacgcgcgcttaagttgccacttttaaactcagcataacgttctgtgttttcgattgtgaccttcacgtcctgcaaaatattgagcggataatgaggaccgttattcagcgccccctgaaaatgctcaatccgcacaccgacaataccttcctgtggggagaaaaagcgcaacgtaaataaaggcgtatcaagctgccaggtacgttcacgcacatcacggggggcagcatagaccaccatttcattatcctgctgttcaacctcgaacacctgaagcgggtgaatcaaattgaggccaggttgaatcaaccagtttccatcgctaattttcattgccgttccttagttctgcacttcttgagaggtgaattgttgctggcaacggcgtttaccctgagccagctgttccataacggttttcagattgtgcgtcgtgagactgtagtagcgtttagcgataatcgcgctcagcaaataacagatcgccggaacaatcgtgaatagcgcaataatgatgctaatcgtggcgctgttctgcgctttttctgccgcatcatatccgccataagccagcatccagccgataagagcgccgccgaaggccaaccccagtttgagcacaaacagcgtgccagcaaaactgatcccggtcaggcgtttaccattgcaccactcgccgtagtcgacggtatcggacatcattacccactggataggtgtcaccagttgatgcaacacaccaatcacgaagatgaagacaaacatagtgatgctggcctgcatgggaacaaagaacatcgcgaggctaatcactgccagcagggcgttcgtccaccagaagatagtgactttacatttccagtcggtcagaggttttgccagtgcggaaccaatcaggttacccacgcaataagtggtgagaaaagcgacaaacacttccggcgtgcccaaaatccatgtgacgtaatacatcatcgccccaccgcgtacgcacaccgccaggatattgaaaatggttagtaaaccgacaatccgccactggtcgttttgccagatatcacgtaaatcttcccgcatagacgttgttgtaggtggtgcttcaacgcgttctttagtggtgaagaaacaaaatgccagcatcatgaatgccaccacggaaaggaccgcgataccgccctggaaaccgagtggtttattatcaccgccaattaaattaaccagtggcatcatcagaacagtagaaagcatgcctcccgcggtcgccagcacaaaacgccaggattgcaggctgatacgctgagtcgggtcattggtgattacaccacccaatgcgcagtaagggatattgacgacggtataaagtaaggtaagtagggtgtaagtaattgctgcatagatcattttgccgttcatactgagatctggcgtgctataggccagtacacagacgatcccgaatggcagtgcgccaaacagtacccacggacgaaatttaccccagcgagagcgcgttcgatcggccaacaaccccatgcaaggatcggaaatcgcatccagtgcacgagcgaccaaaaacatggttccgacaaaaccggcaggaatgccaaaaatatcggtataaaagaacatcatatataacattacgttatcgaaaataatgtggctggcggcgtctcccatgccataaccaattttctctttaacggacaacacttcactcttcatctgcttttccttgatgctataggggtgctgagaccgataacgcattttgtaaaccatccctgtgagagcgaatattccgatatctggttattaatttatgattcttgttttatgtgatcgtggtagcgttaattccgctcatatatcattgtaaaatatgggttttatatgaactataatgctttcgtgataatacgctgcgtgtattaggcggaaaaaactgatctgggggatgtagaaactcaaggaagtagctataatgcgccccgcctccatgtagcaatcgaggcgcggaagatcgtcgtctccggtgaggcggctggacttcaaatccagttggggccgccagcggtcccgggcaggttcgactcctgtgatcttccgccaaaatgcctctcctgacgttctccaaccccttgtaatactgtcaatccagatattttctactgctcaatattcaatcggcttcaggaatacctggtctaaggttttgtgatggacgatgagcggctgaagaatccgcctgtcggttcttctgtcctcgaacgcatccgcgatattcacgccagtatgcgccgtgtttatttgcaggtgatttgcccccctgctgactctcagccaactgtatcgccattaaggtgaagatgttgttttactcgccccagaacacccttttttatacgactattctatttctttaaccgctggcgaaaaaaactgactataaacttcaccaataatcagactgccatcaagattaatttgttcatttaatatatcaaatcaacttgttttatttttactatcaaaaatagctcattgccttactataattaatatataaattcggtaattaattcttaacatgcttttactaataatctcaattgctggccctataatattgcgctagcattgctttctggttgtatcagcgatactcaaaaattcttaatacaatactcattcgactggtacttatttgtaactcagttatattttttcgcccggtgattcagaagaatgcaaaaaacggctaccactccaagtaaaatacttgatctcactgccgcggcatttttacttgtcgcctttctgacgggtattgcgggcgctcttcagactcctaccctaagtatattcctcgcagatgaactgaaagcccgtcctataatggtaggttttttcttcaccggtagcgctattatgggaattctggtcagtcaatttctggcaaggcactccgataaacaaggcgaccgtaaattactgattctgctatgttgcttatttggagtgctggcctgcacgctttttgcgtggaatcgcaactacttcattctcctcagtacgggcgtacttctgagtagttttgcttccaccgcaaacccgcaaatgttcgccctcgcccgtgaacacgccgacagaacaggccgtgagacggtcatgttcagtacatttttacgtgctcagatcagccttgcctgggttatcgggccaccgctcgcttatgaactggcaatgggatttagttttaaagtgatgtatctcaccgctgccatcgcatttgttgtttgcggactgatagtctggttgtttttgccaagtatacaaagaaatattcctgtcgttacccaacccgtagaaattttaccctccacccacaggaagcgggatacgcggctactttttgtggtctgtagtatgatgtgggcggcgaataatctctacatgataaatatgccgctatttattattgatgaactgcatctaaccgataaactgactggagaaatgattggtatcgctgccggtctggaaattccgatgatgttaatcgcaggctattacatgaaacgtattggcaagcgactattaatgctcattgctatcgtgagtggaatgtgtttttacgccagcgtactcatggcgacgactccggcggttgagctggaattgcaaattcttaatgccatcttccttggtattctctgtggtatcggcatgctttattttcaggacttgatgcctgaaaaaataggctctgcgacaacgttatatgcaaatactagtcgcgtcggctggattatcgccggctctgttgacggaattatggttgaaatctggagctaccatgcgttgttctggctggcgatagggatgttgggtattgcgatgatttgcctgctgtttattaaagatatttaactcaccagtctgggctaagaaaaatcggcgtggcgcaaacagagccatcctcgccatttttgctatcatgcctgcatacataaacgacaaaacagtatgcagagggaaaaatgggttccaccagaaaggggatgctgaacgttctgattgccgccgtgttgtggggaagtagtggggtctgcgcgcaatacatcatggagcaaagccagatgagcagccagtttttgactatgacgcgtttgatattcgccggtttgattctactgacgctgagttttgttcatggcgataaaatcttttctattattaacaatcataaagatgccattagcctgctgattttttccgtggttggcgcgctaactgtacagctcacttttttgctaaccatcgaaaaaagcaacgcagccacggcaacggtgctgcaattcctcagtccgacgattatcgtcgcctggttcagtctggtgcgtaaaagccgcccgggcattctggttttctgcgctattttgacaagcctggtcgggacttttttattggtgacacacggtaatccgacgagtttaagcatctctcctgccgcgttgttctggggcattgccagcgcatttgctgctgcattctataccacctatcccagtacgctaattgcccgctatggcacgttaccagtcgtcggctggagtatgctgattggcggtctgattctgttgcctttttatgccagacaaggaacaaactttgtcgttaacggcagtttgattctggcgtttttttatttggtggtcattggtacgtccctgacatttagtctgtacctgaaaggagcacaattaattggcggtccaaaagccagcattttgagctgtgcagaaccattaagtagcgcgctactctctttgctgttgctggggatcacgttcacattaccggactggctgggaacgctgctgattctgagtagcgtgattttgattagtatggattcccgtcgccgcgccagaaaaataaatcgtccggcgcggcataagtgagaattaccagccaggcaccgcgccaccgttaaaaatggtttctgccgctttagcgacttcgggactttgataagattgcagaaattccttcacgttttctgcattcttattatcttcccgtgccaccaaaatattcacatacgggctattcttatcttcaataaatacgctgtcgtgcaccggagaaagcccggtctgctgaatgtaagtggtgctgataatcgctacatcaactttgggatcatccagtacgcgcgggagctgcgccccctcgagttccataatctgcaaatgacgaggattatcggttatatccagcgcggtaggtaataacccttttccctctttcagagtaattagcttctctttttgcaacagtaaaagtgcgcgaccaaggttggtcgggtcgttggggatcgccactgtcgcgccttcttttatttgcgccacggttttgatttttttggaataacccgccatagggaagacaaacgtatttcccaccgctaccagtttataaccatgcgcctgattatcttgttcaagaaagggtcgatgctggaagacattcgcatcaagttcgccatgatttgtcgcatcgttcggtagcaagctaccgctaaatcctaccagttcaacatcgaggccatatttctcttttgccacctttttagcgacttccgcgacatcttgttctgcgccatttataacgccaactttaatgtgttttgcatcgctgctactctggtcgcaacctgccagcagaattccggccagcaataatgcggcccctgtccgtagatgatgtgttgtcagtttcatttttttatccttttattaatgattacctgactatagcggtaaggtcgctgcggtttaaaaaacgaaacgctatcgataagaataaaaaggaataaaagtggaatataaagtctggcacttcttactgaccacgcaagcgcgtttcgtacagcatgatgagagcgatgaaagcaaactacacttatgcttcattcgatacacatttgtaaaaggttgaatccatgaaaccaacgacactactgcttattttcacttttttcgctatgccaggcatcgtatacgccgagagcccttttagcagtctgcagtccgcaaaagagaaaaccacggtattacaagatttacgtaaaatttgcacgccacaggcgagtttaagtgatgaagcgtgggaaaagttaatgttgagtgatgaaaacaataaacaacatatacgcgaggccatcgtggcgatggaacgtaataatcagagcaattattgggaagcgttgggtaaggtagaatgcccggatatgtaagaacagcaacaactactgaccaacgcttctttacctgatatcaggatttcttcattttcacctttgcagtaaccaacaatgcagtcagcaacatcaatgtgccggacaacatcaacgggctagtcagaccaatattatccagcgcataaccgccgattgccgcgccacaggtattagcaagctgaataaccgccacctgaatagacccggctttttctgcctgatcggccaggctgcgggtgatccacgtactccagccgacgggaaccaatgcaaaagttagcccccagataatcgccacgccggtagcaacgattttatcgcttccccacaacgtcagtaccaacgcactcacagccagtattaacggcgcgcctgctaaggccagttttacgctacgtttaagaatgaagctgctaaggctcgtaccaataaagctggcgataccaaaactcaacagcaccagcgttaagccatccacgccgaatcccgccaggttcatatacaccgggcgaatatacgtgaagaaagcaaactgcccggcgaaagacatgaagatggcgatcatccctgccatcacacccggacgttgtaataagcggaaagtattttgtttctgatggctgggttcgcctggcagactaggcaaacttttgataatccagaaaatacacagcacgcccatcaccgccgccgcattaaagacattgcgccaaccgataagctcgcctaaaaaactgcccaacggcgcggcaatcaccagcgcaatagaaaccgcgccgaagatcacgctcagcgccttcggcaccgtacgcggcggcaccagacgcatggtcaggctcgcgctcatcgcccagaacccgcccagcgccagccccagacaggcacgaccgattaaaagcaaactgaaactgttagcaaaggaaaccagcaagcaggagagcgtcagcaaaacggcaaacaaaataacaacgtagcggcggtcagtagcctgaattgtctgggtaataaacaaactggcaaacattgccacaaaggcggtcacggtcacgctttgcccggcaaccccttcgctaatgcctaaatcctgggccattggcgtcaacaaactgacgggcaaaaactcaacgataatcagacaggcgacacaaaacgccacgctgaaaacggcactccagttcggtcgggtgatggcatccgcgccgcggttttcggcaataaattcactcatggtgttacccgtggcatgtttcaggggaaaagcgctccactttaacatactaatgtgactcgcatttaacgtttttgcaacttttacggtgttgctactgctggagttaagatcgaaacggaacagggcaaagattaccggatgcggcgtgaacgtcttatccacccgacaggtcaggcgcggtctgtaggctgataagacgaaacggtttcaatgcaaccagtgaacgccctcggcaggctgaaagaacgcgttatagcgcatctgaaaagcattaatatcctgcatttcaggttcggtttcgcgcagaaaacctagcgccagcctgacctgagcgtcggtaatcggcgcggcgaggcgagctttttgtaaaatccgatgccattgcagcaggttctgttcgctaccatcgacaatgacaatttgccagatgagcaacacctgcgcggcgttttgcaggtggctctcatccggacgatgcaaataacgtaaaaattcgtcaccagcactctttcccatttgatcgaccatgctctccacgggtacgacatcgatgttcagccgatcgctgagacggcgaatcgcttttctggccccggatgtcagcacccgaaaaccaaccacaaacactaccgccagcgtggcgagcattatccagatcatgagttctcctgcgtaatcagaactcatgatatctggaaaccctcgccagttattaatccaccagaataatcttcagtgcaaacagagctgcgaccaccaccacacacaggttcagatcgcgccagcgcccggtgcatactttcatgatgcagtagctcataaagccgagtgcaatcccttcggtgatgctgaaagtaaagggcatcatcaccgtggtaataaacgcaggcacgctttcggtaaaatcatcccagttaacgcgcgccaggctgctagtcatcagcacgccaacaaagattaacgctccggcggttgcgtaaggaggaactatcgccaccagcggactgaagaacataaccaacaggaacataacgccaaccacaaccgcagtcagccccgtgcggccaccgactgccacaccagaagtactttcaatataggcagtaacagagctggtgccgataaacgcacccgccacgctactgacgctatcaacatacagcgccttattcatattggggaatttaccgttaccatctattaagcccgctttatcagttacaccaattaatgttccactactatcaaataggttgatcagcataaaggagaaaatgataccggcgagttcaagtgttaacgcgccgctcaaatctacttcaccaatgacgccgctaatatcaggcggaatggaatagacgccgctaaaatgaacatcaccgaaaaataatccacagcaagacgtcaccacaatagaaaccagcaccgcggcatgaaaatgacgactactcaacacggttataataaaaaaccctaaaatacctaacaacacgccgtgagaacttaaatcgccaatcatcaccagcgtgtctttattggcgacaataacgccagtattttttaatcccattaaggcgataaataatccaattccgctggtgataccaatacgtaaacttaagggaatgttggagatcatccagtaccggatacgaaacagcgtgagcaaaaatagtccaactgcgccccagaatattgcgcccatcccggtctgccaggagatgcccatcgcccccacgaccacgaaggcaaagaaggcgttcagccccattgccggagccagcgccacgggtaagttagcaaatatccccatcgcaatactgccgataccggcaatcaaacaggtggtaacaaacaccactttcgggtccatttgtgccgcgccgaggatttgcgggttcacaaaaacgatgtacaccatggttaaaaaagtggtcatccccgcaatcaattctgtgcggacggtggtcccatgctgaggtagtttaaataatcggctaagcgtcccactttcattactcacgtaatcggtattgtcattattcatttttttgtccattggaggagatttaatcccttgcttttgtaaaacaaatgacaacaacggttcagtgataattatcacatttcaattgcacattaatggatattctttaataatctcgcgacgtttctttatgataaataataatcaaattgataaaatcaaaatgagaaaaatatgaataattctattaaccataaatttcatcacattagccgggctgaataccaggaattgttagccgtttcccgtggcgacgctgttgccgattatattattgataatgtctctattctcgacctgatcaatggcggagaaatttccggcccaattgtgattaaaggacgttacattgccggtgttggcgcagaatacactgatgctccggctttgcagcggattgatgctcgcggcgcaacggcggtgccagggtttattgatgctcacctgcatattgaatccagcatgatgacgccggtcacttttgaaaccgctaccctgccgcgcggcctgacgaccgttatttgcgaccctcatgaaatcgtcaacgtgatgggcgaagccggattcgcctggtttgcccgctgtgccgaacaggcaaggcaaaaccagtacttacaggtcagctcttgcgtacccgccctggaaggctgcgatgttaacggtgccagttttacccttgaacagatgctcgcctggcgggaccatccgcaggttaccggccttgcagaaatgatggactaccctggcgtaattagcgggcagaatgcgctgctcgataaactggatgcatttcgccacctgacgctggacggtcactgcccgggtttgggtggtaaagaacttaacgcctatattactgcgggtattgaaaactgccacgaaagttatcagctggaagaaggacgccggaaattacaactcggcatgagcttgatgatccgcgaagggtccgctgcccgcaatctcaacgcgctggcaccgttgatcaacgaatttaacagcccgcaatgcatgctctgtaccgatgaccgtaacccgtgggagatcgcccatgaaggacacatcgatgccttaattcgccgcctgatcgaacaacacaatgtgccgctgcatgtggcatatcgcgtcgccagctggagcacggcgcgccactttggtctgaatcacctcggcttactggcacccggcaagcaggccgatatcgtcctgttgagcgatgcgcgtaaggtcacggtgcagcaggtactggtgaaaggcgagccgattgatgcgcaaaccttacaggcggaagagagcgcgagactggcacaatccgctccgccatatggcaacaccattgcccgccagccagtttccgccagcgactttgccctgcaatttacgcccggaaaacgctatcgggtcattgacgtcatccataacgaattgattacgcactcccactccagcgtctacagcgaaaatggttttgatcgcgatgatgtgagctttattgccgtacttgagcgttacgggcaacggctggctccggcttgtggtttgcttggcggctttggactgaatgaaggtgcgctggctgcgacggtcagccatgacagccataatattgtggtgatcggtcgcagtgccgaagagatggcgctggcggtcaatcaggtgattcaggatggcggcgggctgtgcgtggtacgtaacggccaggtacaaagtcatctgccgttacccattgccgggctgatgagcaccgacacggcgcagagcctggcggaacaaattgacgccttgaaagccgccgcccgtgaatgcggtccgttacccgatgagccgtttattcagatggcgtttctttctctgccagtgatccccgcgctaaaactaaccagtcaggggctatttgatggcgagaagtttgccttcactacgctggaagtcacggaataataaaaaaagcccggcgtcatgccgggcaaaagtcaccagttacgtttatgccactgtcaactgctgaatttttttctcgcggcggattttgcgttcttccattaccgccactatcgccatcaggcagatacaaccaatcgcggcgatatccagcgcggcgaaggtgcctgcccagccggtaaggccgaataccggcgtcccatcggcaatcattcccagacctaacttggcaaagctgtcaccaatcaggtaagcaaaggtgcctttaataccatcggcagcgccaatcgcttttttaggtacaaagccaacagcagccacaccaatcaacaattgcgggccaaagaccaggaaacccaacgcaaagagagaagccagatagatatattcgttactggcatgttgatacacaccgagcgtggcgataatcagcgccagcgcgatgcaggccaccaggccacggcgaccgttcgccaggtcagagagccagccccacagcagcgtaccgaccagcgcaccagcttcaaacagcgtaaagccctgaatcgccaccgctttagagagtttcagttcctggaacgcgtatacggtactccactggtcgataccaatacgtaccacatagaggaaaatgttggcgaagcacagcagccagatcactttgtttttcagcacatactcaacaaagatctgccacttggtcatatcggtagattctgtctctttgtcctcttcgctgatctcctcgccgaacagttcttcagctttgccgaggccataagattccggggagtcgctgccgtaacgcaggccgataaaaccgacaatcagcgcgataatgctcgggaagataaacatgccgatgacatggccatcgaacaggtaatttgccccgaacagcgccacacctgctgcgcctgcaccgccaaggttgtgagaaatattccagaaaccgaggaatgtcccgcgtttacgacgcggcgtccatttggtgatggtggagtaactgcagctaccgccggtactctggaaaagccgcttaaggcgtagaaggcaatcatcaggaacaggctaacgctgccgctgcccatactggcactgaagcccagcatacaaatagcagagaggatcagcatgaacggcaggaattgtttggtgtttttgccgtcggcgtagtaggaaaccagcgttttacccacgccataagtgatggagaaacccaggccgatcatccccagctgcgtcatgctcaacccgtaggtgctaatcatatcgttctgcgcgatgttaaagttcttgcgaatcaggtacatcgtcaggtagccgataaagaccaccaggtaggattgcatgaacggtttgaaccacattttgcgccgcacttcgagcggaaggtccagggtcggcttgcgaacctggtttaagaaagccagcatgggttactcctgaaatgaatacctgcgtgaggcatgcattgtaaaaatcagcagcaaatcaggcctgagatagcgtccaggcaaaacctggaaaatttcttagttttgccggatatgaagtgaaaaggtgagatgcatcacgcttcgcgcggtgtctgggcgttcaaaaagggcagtaacagcagtgcggaaatcccggcggcgatagagataaccacaaaaaatccgctccagtgccaggtatcgagtactttcgccagcggccaaccagcaaggctcgcccccagataagcaaacaagccgacaaaccccgtcgccgcccctgccgcctctttgtgggaacactctgccgccgccataccgattaacatctgtgggccaaagacaaaaaaaccaatggtgaagaagcaggttgcctgcatcacgtagctggcaaatggcatcagccacagggagccgacactaagcaaaattccggcggcgaaaatcaaattcatcggccctcggttgccgttaaacaatttgtcgctgccccaaccggctaccagcgcaccgataaatccgcccagttcaaacatcgtcactgccgtattcgccgtgaccagatcgacgcccagtgtctcggacatatacaaattgccccagtcgttgatcgccgcccggaccacatagaccagcacatagcaaaagctaagcagccagatatacggattcagcaacacatatttggtgaggatctctttacgcgtcaaccctgccccttcttgttgttgagcaatttccagcgcgtcgtgtcgccattcaccgaccgccggtaaacctaacgcctgcgggcgatcgcgtagccgccagcagagaaaaatccccacgactatcgccatacaaccagcaatcatcatcccggcacgccagccgtaatgcagcgcagccgctgccatcacaatgggaatgagtgcgccgccgacgttatgcgccgtgttccataatgcccaccaaccgccgcgctcggtacgactataccaggccgttaacagacgcgcacacaccggactaccccagccctggaaaaaggcgttcagcacccagagcacggcaaacgcccataggctcgtgctgaagccaaacagaatgttgataatgcccgtggcgataagccctatccccataaaataacgggcattactgcgatcgctgacaatgccggagacaaacttgctcacgccataggtaatgtaaaacagggtcgctaacaggccgatatcgctacggctgagcacgccgttagcaaggatttctggtacggcggcgttaaaacttttccgcgtgaagtaaaacagcgcgtaacccagccagatggtcagcagaatatgccgacgccagtagcgatagcgggcatcaatttcatatttatcagtcattaatggcgcatcggcaggcgctttcagaaacggcaacatcatcaaaccttagacatagcgttgaggtagagaaacgctgacacgcgtgccgtgcagacaggaaatgtgtaatgtgccacccagcgccgttacgcgctcgcgcattccggtgaggccaaaaccttgttgcccggaacccggcggcaaaccgctgccatcgtcttcaataaccagcatcaaccgttcatcctgctgccagccttgcagggtgaccgcgctggcatcagcatgtttcacaatgttgttcagcccttcctggcagacacgaaacagcgtcacgcgctggttttcgcttaacgcactttcatcgattcgccattcgagatggctgacaataccgcgcccttccagctccatttcccgcatcagactgcggatggcctgctccagggtgagatcatccaactggcgcggacgtaaccgacccaacaaacggcgcaccgcgtcgtaaacgcccaggcttagttgttcgatgagctgcccgctctgcttcacgctggcgttatctgccgccagccgctgaacaatgcccgcctgagtacgaatagcagtgatggtctgaccgatatcatcatgcagctcacgcgccacatcacggcgcacgctctcttcggtttccagcaaccgttcagccagatgctgattgcgcgccagttccttttgcaggctctggttaagttcacgcaaccgctggatgccagcgccaagcaacaaccctgtcagactttgcaccagcaggctgagcaataaatccaccggatgatcgcgccaggtttgactggcgatcagcgcgatggcgttcatcaacgtcgcaatcagcgccccttgccaaccatagtgccaggccagcgcgataatcggcagcgccagacagaatggcgtaaagcggctcagttcgtccggcaatcccaactggagccagagactgataacaaacagcagcaagtaccagaccagatgtcgcccgcgccagttgattggctgagaaaccagactcggaccgagcggcagccaggtgttattggcgagatagtgccagaacaccagacatatcggggccagcgtcaggccgccagttaaagtcagcaacagcgcattccagctctctttgccgtgccaaagccagggcaggctctgcaacaacgccgccgccgttaacgccgccccctgtaacagcaaggtgcgccagtcacgctgatggcgatagcggctgatcagcgctacgggcagtaacgtcagtaaactaccgatcatcaataacggaaaatgggttaaaccgaccgcctgcgttagccagtaaatcagcagccactccgcgcccagcaatacgggccagtatccgcgcgggcattgcagcattagccccagacgcagaccaaacggaaataacagcaccgccatatcagggcgctcaaccagatgcaggctgatactccacaggcaaaaccatgcggcagagaagataaaaaagcaggcaataacggtaattaagcgggagaacaacgtcttcatcaccagccatcaaacatgcggcgcgccagctctacgtcgttactgacgcccagtttttccatcagattggcgcgatggacgtgtaccgttttcggactcaagcccagttcggcggcaatctctttcaccgccattccttgcgccagtttttccgccacctggcgttcacgtttggttagcgggtcctgacgaccggatgccagtttaatggcaatatccggcgtcagataacagccgcccgtggcaaccgtatgcaccgcagcaatgagttcatccgggctacagcgtttggaaagaaagccgcgtgcccccgcgttaagcgcctgctcaaccagcgcaggactgtcgtgaacggagagcataatcgtcgccatacctttcggcagctggcttagcagctccagaccggagatatcgggcatggagatatcgcaaatacacacctgcacaccgcgccccggcagccccgccagcgcctcgcgcccgctaccaaactcggcaactacctgcaaatcaggttccagccccagcagctgcgcaaagccggagcggacgatgaggtgatcgtctataagggcaacggtgatcatggtcttgtcctggcgggtaaaaaaaatacgcgcttaccttaacgataagcgcgatgttgttcaagccttgagcggttactgaaaaaacaccgcgatcttgttaaacatcgtcggatcggactgattacgctgcactttcacgacatcttccagcttatcgatttggcttatcatctgctccagacgctggtcgtcattgaccagtagccagatatggcttttgtcgctgtcctgaatcggcagacaaagaatgccttcaacgttaaaagcgcggcgggcaaaaaggccacaaacgtgggtcattacgcccggatggttgcgaacggtgagctccagaattacgttgtcatgagttgtgttttgcatggcttattcccccaccatttcagtattcgccgcacctggcggcaccatcgggtaaactttttcttcggcatcaatgcgcacatggatcagcgccgggccagggcgattgatgatttcctgcaaactagcctgcggatcggcttcgttattcaaatcacaggtttcgaggccgaatccggcggcaatctgcataaagttgattttgcccggataggtggcggcaaaaacgccttgctcgtagaacagactctgttgctgatgcaccagccccagcgcttcgttgttcatcagaatgattttgacatccagctgattttcactggcggtcgccatctcctgaatattcatcatcaggctgccgtcgccggagaaacacaacactttgcgatccgggttcgccagcgcagcgccaatcgccgcaggcaggccaaaacccatcgtgcccagcccaccggaggtcagccactggcgtgggcgattgagcggataagcttgcgcggtccacatctgatgctgaccaacgtcggtggtgataattgcattgtcatcgacacaggcggcaacggcgttgatcaggccgtaatggcttaacggatcgcacgctttcgggattggacacggaaactcacgctgcaaatccgctaccaactggtgccactctgcacgcggttgcgcttccaccagcgggatcaactgcgccagcacgtcatcaacatccgcctgaatcgccacgtgcggctgcttgattttacccagctctgcacggtcgatatcgacatgaatgattttggcattcggacagaactgctcggttttgccaatcgcccggtcatcaaaacgcgcaccgagcactatcaacaaatccgcctcctgcaaaatatagttggtgctgcgcacgccgtgcatccccagcatacccaggctcaacggatgcgcttttggcaacatgcccagcgccattaaagtcatggtggtaggcagttgcgctttctccgccagttcacgcacccgtgcgggcgcattgatcacaccgccgcccagataaagcaccgggcgtttggcagcgttaatcatcgccgctgcgtcacgaatgctttcttcgctaaaggcgggggcggcggctttttctgccatagcgggctgtgtttcaatctcaaaaactgccgtttgcacatccttaggaatgtctatccacaccgggcctgggcggccactttgcgcaatgcggaaggcatcgctcatgacctgcgggagttcttcgatatgtctgaccagatagttgtgtttggtgatggggatagagatgccgtaggtgtccacttcctggaaggcgtcggtgccgatcatgctggcgggaacctgaccagtgatgcaaatcagcgggatggagtccagccgcgcatcggcaatggcggtcaccaggttagtcgcacccggtccgctacaggccatacagaccgccggtttaccgtcggtgcgcgccattccctgagcgataaagcccgcgccctgttcatgacgggccagaatatggcggatttgcgtgctttggcttaaggcatcgtaaacaggcaggatagaaccgcccggaatgcctgtcacaatcttaatgccctgctgttccaggaaatgaacgataaattctgcgccggtaaagcgcttacgcgtgcttgttgtgccgctacttgccatgctccagtccttttcttctgggccgactttccgggaggtgcttaaacgaaaaaccccgcccggtttgcgccggcggggttttggaatcgtgtgttgttccagtccttacggcgcattgccgacgaccaccaccacacgcacgacgaccactgcggcggatggcgcagttggtagtagttttgcgttgagcatggaagtagtcattggggaccttgttggttttgtgtttaacaatatttatacaagcacagctttacaggggagacaatggaaaatttttcagcaagggaaaattgaggggttgatcacgttttgtactgaattgcagataacaaaaaaccccgccggagcgaggtttcgtcagtcgcctgcggctggtaaccgcaaagcacactgtattatgtcaacactgaaagtatacgtgttccgcgcagaacgcgcaatttcggcacgaattttgacgtatttagtgcatagttgagtatcgatcacagtttgcgttttgtccaaatattactgtttatttatacagtaaacttctataatatcactgtacgcaatgtgttatgcgggggccgcatcgttacccggcgcactaagttctggctgaaacgggtggtgccgtcagcgccttaaccccgcgtgagcacactgtgttatgtcaacaagcacaacgtttctccttgagataccgcgtgcacaacagctggcaacaggcagcggaaaggtacgtcagctggcagtgctcctgaaccacaggagacgcgtatgaacctggtggatatcgccattcttatcctcaaactcattgttgcagcactgcaactgcttgatgctgttctgaaatacctgaagtaattcagattcaagtcgcaccaaaggggagcgggaaaccgctccccttttatatttagcgtgcgggttggtgtcggatgcgatgctgacgcatcttatccgccctaccatctctcccggcaacatttattgccgcttttgtttacatattctgccgctaaacaattccccattcctggcgtatatctggctaacattcatcaatgtgatagattcctctcccgcatttatgggaatgcgtagtgacttattctaattatttttataaaagcatccgtgataatgaaaaggcaaagaaacgtcaatttgttattgatgttggtattactcgtggccgtcggtcagatggcgcaaaccatttatattccagctattgccgatatggcgcgcgatctcaacgtccgtgaaggggcggtgcagagcgtaatgggcgcttatctgctgacttacggtgtcagtcagctgttttatggcccgatttccgaccgcgtgggccgccgaccggtgatcctcgtcggaatgtccatttttatgctggcaacgctggtcgcggtcacgacctccagtttgacggtgttgattgccgccagcgcgatgcaggggatgggcaccggcgttggcggcgtaatggcgcgtactttaccgcgagatttatatgaacggacacagttgcgccatgctaacagcctgttaaacatggggattctcgtcagtccgttgctcgcaccgctaatcggcggtctgctggatacgatgtggaactggcgcgcctgttatctctttttgttggttctttgtgctggtgtgaccttcagtatggcccgctggatgccggaaacgcgtccggtcgatgcaccgcgcacgcgcctgcttaccagttataaaacgcttttcggtaacagcggttttaactgttatttgctgatgctgattggcggtctggccgggattgccgcctttgaagcctgctccggcgtgctgatgggcgcggtgttagggctgagcagtatgacggtcagtattttgtttattctgccgattccggcagcgttttttggcgcatggtttgccggacgtcccaataaacgcttctccacgttaatgtggcagagcgttatctgctgcctgctggctggcttgctgatgtggatccccgactggtttggcgtgatgaatgtctggacgctgctcgttcccgccgcgctgttctttttcggtgccgggatgctgtttccgctggcgaccagcggcgcgatggagccgttccccttcctggcgggcacggctggcgcgctggtcggcggtctgcaaaacattggttccggcgtgctggcgagcctctctgcgatgttgccgcaaaccggtcagggcagcctggggttgttgatgaccttaatgggattgttgatcgtgctgtgctggctgccgctggcgacgcggatgagccatcaggggcagcccgtttaagcgcacgtcaccgcagcatcgtcatcagctccatgggagaacgatgctgctttatcagatcacgcatcacccgcatatgcggtgcggagtaagaataaaacgcctgatagcccgcacaaagcacgctgtctggcgtctcctgccgagcgtgcgggcacaggcgatgccagtcgcacgcctggcagtcacagcgcggttgcgggttttcgctgccacaccatttttgtaaggtggcgtcaaaaagctcaatgctgatacgactgatatctgcccgcacccaacactcgaacagggcaattaaaaatttcccccacagctctgctgtcacgctagcggccgtcagatcgccccggtcatcaaattcaagatagggaatgagctgtacggagcggatgccccgctgtttgaaattgtgataaaaatcggcaggttgcagagcatccttgtactctacaaccagtttatgcctgtcctcttcagcatcaatgacctgacttcctgtcatgcgactctctcaataaatacgataagttgatgtatatgcgttacagcaaacagtattgcgagagataacaccgcgagggagatcaaaaatttgtcacggactacgtgaaattgggaaaaatcgctattcgtgacatccattaaattgcgattacgggtgtagtgccagaggatcagcgccacgatggcgagaatgccaatgctaatccagaataacatgcccgcctggtgccagttgtgtttgatagccaacgccatcaacgcgccgtagcccagcatggtacgaaaccacgccagacttgtgcgctccggctgcagtcctgggtcggcaatgcgtctggctttgcggctatccggcatacaacaccagtcccataacgttaattatccggcatacaacaccagtcccataacgatcaccgccacgaccatcaatattaagctaatgattaataagctgttggtgtagggcaggtcctctttcagacgcatcgctttttcattgcgtaaccagcgcaagtagccatacatcgctaacccgccggaaaacagacacaacaacaacgccagcagttcgcgaatgacgggcgtggcgaaatctggcgcaagttgatcaagcccaacccccgccgccagaaatcctagtgcagtacggatccacgccagaaaagtacgctcattagccaggctgaagcggtaatcaggcgcttctccgaggcgggaaattttcattgttgctcctttgcaatttcactaacgctctacctttagcggtttttttaagaatttcgtccgcccgtttcctgatatgcttttgccatccgctacaaggaggtcagatgggtatcatagctcaaaataaaatcagtagtttgggcatgctgttcggtgccatcgctttaatgatggggattatccactttagtttcggccctttctccgcaccaccgccaacgtttgaaagcatcgtggcggacaaaacggctgaaattaaaagaggtcttctcgccggaataaaaggcgaaaaaattaccaccgtggagaaaaaagaggacgtagatgtcgataaaatcctcaatcaaagcggtatcgcactggccattgctgcgctactttgcgcatttattggcggtatgcgtaaggaaaatcgctggggcattcgcggcgcgctggtttttggcggcgggacgctggctttccataccttgctttttggtatcggcatcgtgtgcagcattttgctgatattccttatcttttccttcctgaccggcggtagtctggtttaagcagcctgaataatgcccgccgggtgatcatcagcgggcattatcgtcagaacttctgttttttctcctccaccttcaccccttgtgtcggtaggccggtgtcatagtcgcgtacaactgggctatagccatcttgtggacgtggacgaaacgccccatccagcgcggccgtgcatctttacgccacggacgcagactccattggtaactgcggaacggatcgcgaattttgtccatgtaatccaataaggcgtcatgcattttgctgcgaacgtctgcaaaacggatatcatcgatcaggttatgcatttcatttgggtcattacggcgatcgtaaagttcatcactggtgaagaggttgagtaccagtttaaagtcatccgtcacccagcaacgcaccggaataaaaccgccaaagctgtcatgctcaatctcgtagcggttaaattccaccatcacgccgcgtggctctttcacggcaaggatattttcccccggcagaatctctggtttttcaatatctgccagcgccatcattgtcggcagtaaatcgatatgactgactggcgtatcgacctgtcgccgctccccttgcgggctacggatgatcagcggaatgcgggtgatgtcgtcatacatcgccgcccctttactgatcagcttatgtgcgcccatcatttcgccgtgatcggaggtataaataacccacgtattttcacgttgctctggcgttaaggcattgatgacccgtccgatttggtcatcaacaaagtcattacaggcaaaatagagcggatggtgataaagcccgtcatcaccgactgggcttggcatcgcctgcgcccataagcggtgatgttccggtttgttagccaggtcatcctgtgctttctcgcccagctcgtagtaaaaatcagcgtatttctctaaatactccaccggacaggtgaacgggtgatgcggctcatcatagctaaccaccatcaggaaaggctcgtctgcgcgcgcaggctgttgcagaaaatccaccgcccgattgctgatacgatgcgcccaggtgaaggtttcgtcgatatggttcgcctgtaaatcttcgacgctgtttaggccattgcgccacaggctaatctctttttccgtcagttcgctaagatagttcgccccatcgaaccagtaatcagcgtcccactccggcggacactcgccagtgccgaaatagtcatgaccgtcgagatgccatttgccgatgtaacaggtgtgatagccggcatccttaaagtagcgccccatagtggagatgtttttgcctggcgcgacgttgttggtccacgggccggactggttagcgtagataccggtaaatagtccggcccgtgcaggcgtacaaaccggactacaggtgtaggcggaattaaagcgaataccttccgccgccagactatcaatattttgcgtattcagcggtttaccgctatagcaaccgaccatattggtggcctgggtatcggtcatgacgaacagaaaattggggcgtttcataggctatccttcccgtcgggagtaaaggttacggctgggtcgtgacgatgccgccagctgtcaaaaatcaggtagacaatcactacggcggcaatgaaataactgatcatcgctaaccagcgcgtaccgtagccgccgaattcagccagcccggcatagacgccaatcatcgcgaacaggatgccaatactcgcgatcttgacgtttttccacggtttcatgtccaccgcaaacgcatctttgaaggtgaacggcgtggcgcgcggtttgataaaaccgatcaccagcatcacgaccacgttgatgcagaacgtacaggccagcacatagaggaaatggaagtcgaacttcaccagatagttgatggtgatgtagctgattatgccaatccccatcgctacttttgccgccagcgccgggatgcgcgggaagaaaaagcccataatgatgatggtaaccagcggcacgttgtaaatgccgttgagctgtttcatccagctatacagcccctgcggcgcgttggcgatccacggcgcgaccagcacgctaacgatagcgataaagaaaccaaatttgcgcccgacggtgaccagctgctgcggctcggcattctggttaatgatgcgacggtaaatacccatactgaataacgtactggcgctattcagaaagccgttgaaggtactgatcaccgcaccaaataacaccgcgccgaagaaacccaccattggcactggcagaacgttattgaccagcgtcgggtaggccatgtcggctttcggtaaatcctgatacagatgaaacgcaatcaaccctggcagcaccagtaccagcgggtcgagcattttcagcaccgccgttaacagcgcccccttttgcccttccgccaggcttttactcgccagcgtgcgttgcacgatgccctgatttgtacaccagtaaaaggtgttcaccagaatcaaaccggtaaatgccgcgccaatcggcaagggatcggtcgggccaccgatactgtttaatttctcggcgtgaacggtggtgagttgctcaatgccctgcataaagctgcccttgcccatcgcgattaggccaaataccggcaccatcaacccgccgataaccagcccaataccgttgatggagtccgccactgccattgcgcgcagtccgccgatcaccgcatacaaaattcccgccagaccaagcaaaattaccagtagccagatagccgcaccgtgagaaatctgtaggctttccccgacgtgaaacaggctgttgagcgccaacgcgccggagtagagaacaatcggcagaaagcagacgccggtggcaattaggaagcagaagtcgatgataatacgcgtcgttttatcataacgttcctccagaaaatcggggatggtggcaatgccgcgcttcagatagcgcggtaaaaagattagcgcgaggaagatcagcgtcaccgcactagtcacttcccagcccatcacgctcatgccgcttttgtaggcctgcccggaaaggccgaccagttgttccgtggaaaggttggttagcattaagctagcggcaataaccggcgcttttagactacgtccggcaagaaaatagccttgttggcttccggtatctgttttgcggaccttccaccaggtgatcaccgccaccagcagcgtaaaaccgacaaaactcaagatttgtaagctattcatctcatagcccttatttatgtttatgtcccggacgcatgaatatagggagaggtaaaatgcgtcgggtcaggcagtcagattcttaaaatacaaacgtcgtatccctgaacggattgttttctgttaagttcaggttgtgagcataattcgccggagggatattaaaatgaatggaaaattgcaaagtagtgatgtaaaaaacgaaactccgtacaatattcccttattgattaacgaaaatgtgatctccagcggaatttctctgatcagcctctggcatacctacgccgacgagcattaccgggtgatctggccgcgggacaagaagaaaccgcttatcgccaacagttgggttgcggtgtataccgtacaaggatgtgggaaaattcttttaaagaatggcgaacaaataacactgcatggcaactgtattatattcttaaagccaatggatattcactcttatcactgtgaaggtttagtctgggaacagtactggatggaatttacccccaccagtatgatggatattcccgttggtcagcaaagcgttatttataatggcgaaatttataatcaggaactcaccgaagttgctgagttaataactagtccagaagcaataaaaaataatctggcagtcgcttttctgacgaaaattatttatcagtggatttgtcttatgtacgcagatggtaaaaaagatccacaacggcggcaaattgaaaaattaattgccactttacatgccagtctgcaacaacgctggagcgtagctgatatggctgccacgatcccctgtagcgaagcctggttgcgtcgtctgtttttacgctataccggcaagacgccgaaagaatattacctcgatgcgcgtctggatctggcgctaagcctattaaagcaacaaggaaacagcgttggcgaagtcgctgatacgctcaacttcttcgactcctttcatttcagcaaagcctttaaacataaatttggttatgcgccgagtgccgtgctaaagaatacggaccagcacccaacggatgccagtccacacaattaacgtaactctggccagtacgctttgttggcctccagcaactcatccagaatagctttggcgacgctggcgctcggtaccgttttgctcaacgtaatcgcctgccacaggtgctgataactacgctgttcccaggcgtccacgaccagtttttccaccgccacttgctgactcattaaccctttctgaaactgcgggatatcgcgctccaccagtggttcaggccgtagtagcgcacgcgcatctgtttgcgatcttgcagcccaacaatttgcgccatccggctttcaataccgattggcatgtcacagatgttgaggattttcgcattcgggcgcagacgacgcgtggcttctgcgacaatggctgccgggttggagtagttgagcatccaggcatttggactatatttttccatataatccaccagttccaggacgccgccaatggaacgcatgccgtacgctattccgccgggtccgcaagtttcctgaccaacaacgccgtggcgcagcgggattttttcatccagttcgcgcatcgggtatttgccgacgcggatgtgcgccatgacaaaatcaacgtcgctgaatgccacttcaggatcggtggtgtaactaaacgcaatgtccggcgctttttctttaaggatgactttacaggcttcggcaatcacttcctgccgcgcaccatcgttatcataaaatttcagtgcacgaagcgggaaacggtcctgattcgccaggagcatcaacacgatgcctggcgtaaaggtgcttccaccgcctgcgacaaccacactgaatttggtcattatactgcctccgtaatggcaacattttctgcactttgatgagaattaattaagctatcgagctgttcacgcagctgagatacatgcagaccaatgatcacctgaatggcatcgccactacggaagacgccgtgcgctcccagctttttaaagacttcgtcatccagcgtttgactcatgtcatgcagtgcaatacgtaaacgcgtcgcgcaattgttaatgctggagatattgccgaccccgcccagggcttgcaggataccggcagcctgatccagctcttttttttggctctgccgcggtggtttggcctcggctggctttgtattcggctttactgtagagtttcacttccgcatcttcacgtcccggcgtgcacatgttgaactgcagaatcagtgtgcggaaaaccacgaagtacagcagggtaaagcacaacccaatggcgatttgggtcagcatcatatccgcgtggttgctgaacatcgggatccagttttgcggtaaaacttagtcaatcagacctccgcccatgttgcccaccacaccaaagagatacattacggtgctcatactggccgccagcacggcgtgtaccgcaaacagcaacggactaatgaacaggaaggtaaattccagcggttcggtaattcccaccagcatggcggttaaggttgcgggaatcagcaagcccgccacttttacccgattttccggtgcggcagtgaagtacatcgctaaagaaatgcccacggcaccaaagattttactgttaccgtgcagggcaaaaccgccttccgggaacaagcttttcagcggctcggcgctcaaactgaactcttgcagatgctgcgcccagtacatctgaatgccgccttcaacagctgccggaccaaagataaactgtccgtagatgaagtggtgtaaaccggttgggatcagaatacgttcgaggaaggtgtaaacccagaccccaagtgcacccgcgctacgcaggaacgcttgcagagattcaatccccatttgtacttttggccagccgagcaacgtcagccaggcacaggggatcatcaccaggaaggcgataatcaccacataagacgtcccctggaaaatgccgagaaaaaccggcagttttttatcgaacagacggttatgcagcgccgtcacaatgccggaaatgataattgcgccgataatgctggtatcgagggttttaatcccggccatcattgtcagaccgctacctgccaccgcgtcctgagtgaaatcgacgccgaagtagcttccccaggccattcccatcgcgttgatgaaatagttccaggtcaggaaactcaccatcaccgccagacaagcacgcccctgcgcttgcttagcaaggccaatgggtaaaccgacagcaaaaatcagcggcatattacggaataccgtccaaccgccctcttcaataatgtgtacgatttgcgcgaataaactgttcggatcggtcagactttccccgacaaacatcgggttttgcagcaagatggcaagacccaccacaatcccggcgaagggaaacagcagcactggcgtgaacatcgcgccgccaaagcgttgaatttgactgagcatttccacatcctcttttctcaattctgtaagtaggaagcctgattggttatgcggcaggcctggagcgaggataggaagatgcgatcggcagaacatgacgacccaatgggattcgtgatcgctttcatgcttttcgttgggcggtagagatctacgttttcgcgaaaaagtagacctctgtgagcacaggtacacagcatcgaacacatctttaaaaaaaagatgttttttcaatcgattaagcagaacttgtgtgcgcattacccgggcttgcaggcaaaaaagagatctagagatgatctacaaaagcattgcggagcggttaagaattcgacttaactccgcagatttcacgctaaacagccttcttcccggtgaaaaaaagctggcggaagagtttgcggtaagccggatgaccatccgtaaagccattgacctgctggtagcgtgggggctggtggtccgccgccacggtagtggcacttacctggtgcgcaaagatgtactgcatcaaaccgccagtctgaccgggctggtggaggtgttaaaacggcagggaaaaacggtcaccagccaggtgctgatttttgaaatcatgcctgcgcctccggccattgccagccagttacggattcaaatcaacgagcagatctacttctcccgtcgcgttcgttttgtggaagggaaaccgctgatgctggaagacagctatatgccggtaaaactgttccgtaatcttagcctgcaacatctggaagggagcaagtttgaatatattgaacaagagtgcgggattttgattggcggtaattatgaaagcctgacgccagtgctcgccgatagactgctggcgcggcaaatgaaggtagcggaacacacgccactgctgcggatcaccagcttgagttatagcgagagcggggagtttttgaattatagtgtgatgttcagaaatgccagcgaataccaggtggagtaccatttacggcgactccacccggaaaagagttaaccgatactccagaagagcaccgccagtaattggggggtgataatgcgcaggaacattaccaacggatagacagtggcgtaagagagcgccgccgcaccgctggttggatgaagattattagcaaacgccagcgccggaggatcggtcatggaacctgccagcatcccgcacatggtcaggtaattcattttggctaacatccgcgccagaatgccaacagtaatcagcggaacggcggtgatcagggcaccataaccaatccagcttagcccttcgccattgaccagggtattcacaaaatccccaccagatttcagaccaacgacgctgaggaacagcacgatccccagctcccgcagcgcgaggttggcgcttggcggcataaaccagtacagcttgccgatactgccgatacgcccgaggatcaacgccataatcagcggtccgcccgccagccccagtttcaacgcggccgggaatcctggcacaaagacgggaatagaacctaacaatacgcctagcccgatgccaataaacactggcagcatctgaacctgttgcagtttttgctgcgcattccccagcacattggcaacggcatcaattgcggacggacgccccaccagattgaggatatcgccgaactgcaggctgatatcgccactggcgaccagttcgaccccggcacggttcaggcggctgataacaacgtcatagcgttctttaaagtgcaggtcgcgaatacgttttccgagcacgttttcattggtgaccaccacacgctcgacgcgcaaatcagtgcctttcgtggacaggctagtatcgacctcctgaccaatcaccagttgcgcattatgtaaatccgctggctgacccaccagatgcagcaaatcgcccagttggataatggtatctgggctaggaacttttagggtttcttcgcgtttcagacggctgcagataattttgtcgccgttgagaatcggtacatctttaatggctaaatcatgcaggttagggttctcaacgcgaatattgatagtcttgatcagcgcgccgccattggtgcgactagactcgtgctgctgagcttctgtctcgacattgacgcggaaaataacccgcaacatccacatggtgaacaaaatcccgcaaatgccgaatggatacgccatcgcgtaactcatccccatctgatcgaccatttccattggtgtacccaggtcgcgcaaaatctgctgccctgcccccagcgctggcgtattggtaaccgcaccggagaaaatccccagcactaccggcagtggaatatcaaacagtttatgcaggatggcggtaaccagaccaccgatgatgacgatcagaacagcaaacaggttgaggcgtaatccggagacgcgcaaactggcaaagaagcccggccctacctgaatcccgatagtataaacgaacaggatcaggccaaattcctgaataacatgcagcatatcgctacttaatgtcatccccgcctgagaaacaaaatggccgacgatgatcccaccaaacagcacgccgccaatacctaatcctatgccgcgaaatttgacgttgccgataaacaaaccgacgactgccaccaaagccagaatactgaccgttaatgctatatcactcatcgtccatttctcttgagataacattttaattgctacggattatggctgaatcggtgaagcagatttgccttatagcgcacattatcacgggaaagaacgtgccgaaatatcttaaacagtcgaaatttaacgcattgttgagtaagtaagacaaaaaaagccccaccagaatggcggggcaaagagaatagctagttagctatttaacgcgggacgttcgctgatagcgatacgctgcgctgcgatgggttcaggctcattacgaattaaatcaatatgcagtaaaccgtttacgaaggttgcgccagagacttccatattttcagccagcgtaaagctcaggctaaatggctgattcataagcccttgatgcagccattttttctcttcttttggctgctccggcgtgccttttacgctcaggcgcgtaccttccagttgaatctctaaatcttcctgacggaaacctgccagcgcaagggtaatgcggtagtggttatcgtcgcttttctcaatgttgtacggcgggaagctctggctttcaccggcgttttgcagtgcgttggccagtttgtcaaaaccgatccattgacgcatcagtggggataaatcgaagttacgcatagtcatttctccttctaagaagcgagtaagtacctgcaaatccgaagattcgcatatgctccctgacggcgagcatggagatgtcaggccgcgccaggcggccttagggaattagttgatttcgatacggcgcggttttttcgcttccggaatcacgcgttcgagatcgatatacagcaaaccatttaccaggttagcaccacgaacatgaatgttctcagctaactggaatttgcgttcaaagttgcgttcagcgatgccctggtacagataggtgcgctctttttgttcgtcggcgtgagcacctttcaccaccagcagattatcctgggcggtaatttccagttcgctctcagcaaaaccagccacagcgatagcaatgcggtaatggttttcgtctaccagttcaacgttatacggagggtagccgccattactctggctctggttgttttctaagtggttaaacaaacggtcaaatccaatagcagaacggtaaagcggggataaatcaaagttacgcataatcaatagctcctgaaatcagcgagaatgtaagaccttccacaatggacaggtcaggtagccagaacacccatcaggcgcgtcctcatcggctacgatgtaaaaatgggtctggaaatgaacttttcaagccttatcagcggacttttttttgcagtttatggtctattgcatagactgagggggcagcacgaaacgttaaagtgcgatagccgccacagtgcgacgtaatgatgatgttattttcagcaagggatcgctataactcatcaggccaacacccacgatcaacagatgaatttattatgataagaaatgtgttgttagcgttcatgatatgcagcggaatgacattactcggaggatgctccagcgtgatgtcccataccggagggaaagaaggaacgtatcccggcacccgcgccagcgcaaccatgattggcgacgatgaaaccaactggggcactaagagcctggcgattctcgatatgccgtttaccgctgtgatggacacgcttttactgccgtgggatgtgttccgcaaagacagcagcgtgcgcagccgcgttgaaaaaagcgaagccaacgcgcaagccaccaatgcggttattccaccggccagaatgcctgataactgatttagcgatcagtttcggtgatccacagctggccgccttccatccacgccagccactgaccatccgggctgaagaccacggcgtccgcagaaggactattggcgtggtgttcggttaaatactcaacctcgccgctttgcgcatgggcacaagcaattcgattatccagcacaaagcccaaccattctccactcggatgccagttaaatgcagactgaatatccgttttgttatgggttaactggcgcggctcgccgccctgtgggctgataagccacagttgcacaatgccgttatcatctcgcattaaaaacgcgatttgtgtaccctgcggattacagcgcacccagtggcgcgggacgttgactaaccccggataagcccgatggtgggtaaaggttaaacgtcgctgcacgacgccacgcggtggcgcgggcagggttgtttccgttccgcttaacggcgcatcacctgccgctttccagccagcttcatcttgcggtaactcaacgataaacagctccggcactttctcgccctttgggctaagtgtgtcgccaataaatgccagcgcgtgatttcctacccatccttcttcataagcacgattgatttcatcactgccaggctgtggcgtgggcgtggttttgctcaccagcacgcaccagtggctaccgctgtattcacgcggatgctgcttttgtacgttgaccgggccaaacggcgcagcaacaccgacgtttcgcaaatccagcgccggatcgagttcatgcattacatggtcgttataggtaaagctcaccctttcaccgttcgggctaaagacatgcacatggctgccgccgcgcagcactcctggcgtatacggcgcggtaatatccatcgcatcaaggttactcatcttgccgccttcaacaatcactccgcgccgatgatggaagtcgtaatgccatgtttcatcaggattttccgggccgtggatgaaaacatatttctcactcttcggatgaacggtcaccacgccgacgtgtgcgccctgactcgcgcgatagataacctcgacctcgccggtatggatattcacacgctcaatggtctcgccggtaaagctcgcgccagaaggacgcacgtcaaataccagccactggctgtcgggcgtccaggtattggtattggtgagcaggtgattacggggagcaaaggttatctgtttcatggcgcggtcctgatacaaaacgggtcccgccatcatacttcacaaggacttcactttcagacaatagtcttttgccatcgtgatgaatgtgagtgaaaagatggaacatttcgacgtggcgattattggcctcggcccggcaggaagcgcgttggcacgaaagttagcaggcaaaatgcaggtgatcgcgctggataaaaagcaccagtgtggtactgaaggtttcagcaaaccctgcggcggtctgctggcaccggacgcgcagcgatcttttattcgcgatgggctgacgcttcctgtcgatgtgatcgctaatccgcagattttcagcgtcaaaaccgtcgacgtcgccgcaagcctcacgcgtaactaccagcgaagctatatcaatattaatcgccatgctttcgacttgtggatgaaaagcctgatccccgccagcgttgaggtttatcacgacagcctgtgccgaaaaatctggcgtgaggatgataaatggcatgtcatttttcgtgcagacggctgggagcaacatattaccgcccgctatctggtcggtgccgatggcgcaaacagcatggtgcggcgacatctctacccggatcatcaaatccgtaaatatgtcgctatccagcagtggttcgcggagaaacatccggtgccgttctactcctgcatctttgataatagcataactaactgttatagttggagtatcagcaaagacggttattttatctttggcggtgcctatccaatgaaagacggtcagacgcgtttcacgacgctgaaagagaaaatgagcgcctttcagttccagtttggtaagacggtgaaaagcgaaaaatgcacggtgctgtttcccagccgctggcaggattttgtctgcggtaaggacaacgcctttctgattggtgaagcggcgggatttatcagcgccagcagcctggaggggattagctatgcgctggatagcacagacattctgcgtagcgtgttactgaagcagccagagaagctcaataccgcttactggcgcgccacccgcaaactgcgtttaaaactcttcggcaagatagtaaaaagccgatgcctgaccgcaccggctttaagaaagtggattatgcgcagtggtgtggcacatattccacagttgaaggattaaccaacgcgcttcacatcgcccaccagcaggatataagagagcgcgccaatcaacgcgacggcggagatataaaccagtgcaggtgcgaaaccgtaaccctgcgccaggtaccccaccaccagcggaacggtgatgccgcccagaccaccggcgaagttaaacacgccgccggttaaaccaatcaggcgcatcggtgccagagaagaaaccaggctccaggtaatgctagcaaaaccgttaccgaagaatgccagcgccatcaggcacataatcatcatcggatcgttagtgtagttagcgcccataatgcaggtggagatcagcaagccgcagataatcggcgttttacgcgcaaagcccagactaaagcccttacgtaccagcagatccgctacccagccagagagcaggacgccgacaaacgccgcgaggaatggcaccgtggtcataaagcctgctttcagcgccgtgattcctttttcctgggttaaatagttcgggaaccaggttaagaaaaaccacagtgtagaagccaccgcaaattgcccaagataaacgccgatcagtttacgatggaacaccagtttccagtctttggctgttaacggctgacgcgcctctttcttcaccggcgcatcaccatccaccagaccgccgccatcacgaatgtaatccagttcagctttgctgatacctttggtcaggcgcggcggctgataaaccttaaaccaaatcaggctccagataatgccgataccaccagtgacaatgaacacccagtgccagctcaacatctcctgaatccagatcagcagcggcgtcagaaacgccagaccgacaaactgaccagacgtataaaaaccaacggcagaagcgcgttcatgttccgggaaccagctggtcaccatccggttattggtcgggaaagcaggcgcttcgaaaataccggttatcgcgcgcagaccaattaaactcattaagcccgtggcaaagccctggaataaagtcgccacactccagccaaatatcgcaataaaataagtcacgcgagaacctacgcgatctaaaaaccaaccgccggggatctgacatagcgtataaagccaggcgaaggcgctaaatacatagcccatttccgctttggtaatgccgaactcttcctgaatatgggcggaagccacggccaggttggcgcggtcgacataacaaatgactaccgtaataaagatcatcaccagcgtcagataacgccgacgccccggctttgctgcattaacgggaatatccatagcgagctttctccagattttgggcatagcgaagccgctcaccatgccctgtaatttacagagggttatatttttgtattgctgttttagtgcccgatgaggggcttacgtggcaggaattaccactctgctacgctgttatcttcatgacgccagagcggattacgccagtccggggcatttttactgaactcaatcactttagcttcgtcgatttccacgcctaagcccggtttcgttaacggtttaaagaagccgccgaccatgctgaagtcttctttgtttttcacaaagtcgagtaactccgcgcctttgttgtaatgaattcccatactttgttcctgaagtacggcgttataggaaacaaagtcgatatgcaggcaagccgccagtgcaatcggtccgagcggacagtgcggcgcaagggtcacgtcataggcttctgccattccggcgattttgtagcattcggtaataccgcccgcgtgggagagatccggttgcagaatgctaataccacctgcctccagcacgcgtttaaaatcgaagcgactgaacatgcgttcacccgccgccagtggaatatgcgtttgtgccgccagtttcgggtagtattcggcttgttccgccagcaccggctcctcaataaacagcgggcgatacggctccagttctttaatcagcactttcgccatcggcgcgctgacgcgaccgtggaaatcaagaccaaactcaatctgattgccaaaagcttcacgaatttgtgccacggtgttaaccgccgcatctaccgcgcgggagttatcaattagccccagttcttcacaaccgttcagtttgaaggtatcgaagccgatttcgcgtagcgttttaatgccgtcgataacatccgccggacgatcgccgccaacccaactgtaggctttaattttgtcgcgaaccaggccgcccatcagttgccagaccggcgcattcagcactttacctttgatatcccataacgcctggtcaatcccggcgatggcgctcatcaggatcggaccgccgcgatagaatccggcgcgatacatcacttgccataagtcattgatgcggcttggatcctgaccaatcaaatagtcacccagctcgtgaactgccgcttccaccgtacgggcgcggccttcgatcacgggctcgccccaaccgaccacgccttcatcggtttcaattttcaggaacatccagcggggaggtaaacgatacgtggtaattttggtgattttcattgcactgcctctcgatacgccttaacaaatgctgctgcctgctgcgcggtgcgctctacggattgcccggcgcgatagagatcgctgcctaagcccgcccctgcacaacctgcgtctatccactgcgccaggttttctggcgtcacgccgccaacggcaaagactgcgatgtcgcttggcaataccgcttttaacgctttgatgtattgcggaccaaaagcgctactcggaaatattttcagcgcctgcgcgcccgcttcgagcgcggtaaaggcttcggtcgccgtcgcgcagccggggcagacggtcatgccgtagcccaccgcacggcggatcacttcactatggatattgggcgtaacgatgagctgacagcccatcctggcgagcgcatcgacctgttcaggtttcagtaccgtacctgcgccaatcaacgccttgtcgccgtacgcatcaacgatggcgggaatgctttgctcccattgtggggaattcagcgggatttcaaccgcgtcgaacccggcgtcaatcaccgcgccaacatgcgccagcgcctcgtcgggcgtaataccgcgcaaaatggcgatcagcgggagtttagtttgccactgcatgagcgatgctccttataccagcctgaaatgccgtgtcgcccgccaccgccgtcacgtcgcaacccatcgcctgaaaggcttgctggtagcgcgcggtcaggcttgttccggcgacaagggtgatggcgtgttgatgggccacatagtcgcgcatactggcgacctctgcgccaatcaacaaaccagagagaaattcgctgacctgttcgcggggaagtgttcccagcacatggctggcgcgaacttcaaaaagctgcggcaatatggcgggcgtattaagaccacgctcaaggccagctgtgaaggcatcggcagagttttcctgcggcggcaaacctgcgccaatcaaactgtgatttaacagtaaatgatgtaattcaccggtcatcacggtgcgaaaatcgttgatttgctggctatcggcctgcacccatttgcaatgggttccgggcatgacataaagagaggaaggagccagagctcgcgcgccgatcaattgtgtttcttcgccgcgcatcacattgtggttatcgtcatgagagacacataatccgggaataatccagatattgtcgccaacactcgttaattgttcgccaatagagctaaaacaggcaggaacagataaatacggtgcaactttccagccgacgttgctgccaaccattcctgccattaccactggcgttttctcttcacgccagtcggtcgtgacttctgctaacaccgcagccggagattttccgttcaggcgcgtgacgcctgcttcactttgcctgctctccaggcagtggtcgccctgataaagccaggcgcgcagattggtgcttccccagtcaattgcgatgtagcgagctgtcatgtgatttcctttaaccttcgtgtgctgctggcgatcatggtaagcgccgcctgctctgccgcatcgccgtcctgatgtcgtatcgcatcgaacagcgccttatgttcctggagcgtttgcggcatgttggcctcatcgcccatccaggttcgttcaaaaaccgcccgctgcaggctactgatcgcaatgctaagttgctgtaacaccgggttatgcacgctctgcagcaccgcctcgtggtagcgaatatccgcttcgttaaacgcttcgcggtcctgattgttggcaatcatctcgttcagcgcgctttcaatctgcgccagatcgctggaagtcgcgcgctctgctgcccaacgggcaatcgccggttccaccagatttcgcacttcgctcatggcactgataagccgtgggtcgtagtcattttccagcacccattgcagtacgtcagtgtcgaggtaattccactggttacgcggtgccacaaacgccccgcgataacgtttcatttcaatcagccgcttcgccatcaggctacggaacacctcacggatgatgttgcggctggttgcaaactcctcacagagttccgcctcagccggaagcgggctgcctggcacgtatttgccgtgaacgatctgtttacccagcgtaatgacaatgcgatcggttttattgagagtcatggagagtccttgtgctctgtatgttcttctctactttaccccgatcgatgcataacgcggcaactttgtagtaccagcgtgatgacgttcgcgtttgccgtgcgtgtaatgtagtacaaacttatattgttgtactacaatttagatcacaaaaagaacaatgcataaaaaaatgacatgcgtcgggcagaaatctgaaaagggatatcaggcgctaaacaggagggaaagaagagtatgctttcaacggcttagctactcgtttaaaggattaatcatgaagttgaattttaagggattttttaaggctgccggtttattcccactggcgctgatgcttagtggctgtatcagctatgctctggtttcccataccgcaaagggtagtagtggaaagtatcaaagccagagtgacaccatcactgggctaagccaggcaaaagatagtaatggaacaaaaggctatgtttttgtaggggaaagcctggattaccttatcactgatggtgccgatgacatcgttaagatgctcaatgatccagcacttaaccggcacaatattcaggttgccgatgacgcaagatttgttttaaatgcggggaaaaagaaatttaccggcacaataagcctttactactactggaataacgaagaagaaaaggcactggcaacgcattatggttttgcctgtggtgttcaacactgtaccaggagtctggaaaacctaaaaggcacaatccatgagaaaaataaaaacatggattacagtaaggtgatggcgttctaccatccatttaaagtgcgattttatgaatactatagtcccagaggcattccggatggtgtttccgcagcattactgccagtgactgttacgctggacatcattactgcaccgctgcaatttctggttgtatatgcagtaaaccaataatcagtaagcgggcaaacgcgtttatgctgtttgcccgcccacagattaattcagcacatacttctcaatagcaaacgccacgccatcttcaaggttagatttggtgacaaagttcgccacttctttcacactaggaatagcgttatccatcgccacaccgacgcctgcatattcaatcattgcgatatcgttttcctgatcgccaatcgccatgatttcttccggtttaatacctaacacgtcggccagacttttcacccccgtacctttgttaacgcgtttatcgaggatttcgaggaagtacggcgcacttttcagcacggtatatttctctttcacttcctgcggaatacgcgcgatagcctggtcgaggatggcgggttcatcaatcatcatcactttcaggaactgggtattggggtccattttctccgcttcgcagaacaccagcggaatggtggcaacgaaggattcatgcaccgtgtagtagctgatatcacggttggcggtgtacagcgtggtgcggtccagggcgtggaaatgagaaccgacttcgcgagagagtttttccaggaaacgatagtcgtcatagctgagagcagtttgcgccacggtgctaccatcagcggccttctgtaccagcgcgccgttataagtaatgcagtagtcgcccggctgttccatatgcagctctttcaggtagttgtgcacacctgcatacgggcgacccgtcgttagcacgacattcacgccacgggcgcgagctgcggcaatcgcatttttaacggcgggactaatggtgtgatcgggcagcagaagggtgccatccatatcgatagcaatgagtttaatagccatgagttccccaggtagattggttcctgacccatgctaacgcgattccgctcaaaaatcagtacaacacccgagggaaaagggggatgcaacgcgcgttgcgtgctccctttttgcttagcggaagagtttccctttcagcagttccatgcctgcggaaagcagatcgttattggcttgtggactcacttcaccttgcggactgagcgcatcaataatcttcggcaattgttctgccagtaaactggaagctgtactggtatccacgccaagtttttgcccgagatcggacaccgcatttgtgccgagcgcgctttccagttgctcgccactaacgctttgattgccctgttgattactcagccaggtactgagaatggcccctaagccgccactttgcagtttttccagcagcacctgaatgccgccctgctcctcaacccaacttaaaatagcctgatatttccccgcatcgcctttcagaaaggcaccgacaacttcatcaaaaagccccatgataatcacctgtaaagcgttacgtgttgacccaaaaagtatagatttgcgggatgataattgcggattgcagaaataaaaagggcggagatgatctccgcccttttcttatagcttcttgccggatgcggcgtgaacgccttatccggcctacaaaatcatgaaaattcaatacattgcaagattttcgtaggcctgataagcgtagcgcatcaggcacgctcgcatggttagcgccattaaatatcgatattcgccgctttcagggcgttctcttcaataaacgcacggcgcggttcaacggcgtcgcccatcagcgtggtgaacaactggtcggcagcaatcgcatctttaacggtaacgcgcagcatacgacgactttccgggtccatagtggtttcccacagctgttccgggttcatctcgcccagacctttataacgctggatggagaggccgcgacgggactctttcaccagccagtccagcgcctgctcgaagctggctaccggctgacgacgctcgccacgttcgataaacgcatcttcttccagcaagccacgcagtttctcacccagcgtgcagatacgacgatattcgccaccggtgataaactcgtgatccagcggatagtcagtatccacaccgtgggtacgcacgcgaacaatcggctcgaacaggttttgctcagcattggtgtgaacatcaaacttccactggctgccgtgctgttctttgtcgttcagttcgctgaccagcgcgttcacccagcgggtaacggtctgctcatcagaaaggtcagcttccgtcaacgtcggctgatagataagctctttcagcattgctttcggataacgacgctccatacgattgatcattttctgcgtcgcgttgtactcagataccagtttctctaacgcttcgccagccaatgccggtgcactggcgttggtgtgcagcgttgcgccgtccagcgcgatagagatctggtactgatccatcgcttcgtcgtctttaatgtactgttcctgcttgcctttcttcactttgtacagcggcggctgagcgatgtagacgtgaccgcgttcaacgatttccggcatctgacgatagaagaaggtcaacagcagcgtacgaatgtggctgccgtcgacgtccgcatcggtcatgatgatgatgctgtgataacgcagtttgtccgggttgtactcgtcacgaccgataccacagccaagcgcggtgataagcgtcgccacttcctgagaagagagcatcttatcgaagcgcgctttctcgacgttgaggattttacccttcagcggcagaatcgcctggttcttgcggttacgcccctgcttcgcagagccgcccgcggagtccccttccaccaggtacagttcggaaagcgccggatcgcgttcctggcagtctgccagtttgcccggcaggcccgctaagtcgagcgcacctttacggcgggtcatttcacgcgcgcgacgcgccgcttcacgggcacgggcagcatcgataattttgccaaccacgattttcgcgtcggttgggttttccagcaggtattctgccagcagttcgttcatctgctgttcaaccgcgcttttcacctcagaagaaaccagtttgtctttggtctgggaggagaatttcgggtccggcactttcacggaaacgaccgcaatcaggccttcacgcgcatcgtcaccggtggcgctgactttggcttttttgctgtagccttctttgtccatgtaggcgttcagggtacgggtcatcgccgcacggaagcctgccaggtgagtaccgccgtcacgctgcggaatgttgttggtaaagcagtagatgttttcctggaagccatcgttccactgcaacgccacttcgacgccaataccgtctttttcagtggagaagtagaagatattcgggtggatcggcgttttgttcttgttcagatattcaacgaacgccttgatgccgccttcatagtggaagtggtcttctttgccgtcgcgcttgtcgcgcagacgaatggaaacgccggagttgaggaagctcaactcacgcagacgtttcgccagaatttcatattcgaactcggtcacattggtgaaggtttcgaggctgggccagaaacgcaccatggtgccggttttttcagtctcgccggtaaccgccagcggggcctgcggtacaccgtgttcgtagatctgacggtgaattttaccctcgcgctggataaccagctccagtttttggctcagggcgtttactacgctaacaccaacgccgtgcagaccgccggacactttataggagttatcgtcaaatttaccgcctgcgtgcagaacggtcatgatcacttccgccgcgcttacgccctcttccgggtgaataccggtcggaatgccgcgcccgtcatcctgtacagagacagagttatcggcgtgaatggtgacgataatttctttacagtgacccgcgagcgcttcgtcgatagcgttatctaccacctcgaataccatgtggtgcagaccggtgccgtcatccgtgtcgccgatatacatacccgggcgcttacgcaccgcatccagccctttcaggactttgatactggaggagtcataagaattgctcatcaacgtttctcgctcatttatacttgggttaatccgttattttacccttttccacggtaaacatcttgctattttcgtcgctcatgtctataacgtgttcagcactgatcgcgctgacaaagacctgactttgcgtcgcttttaagcggctggcaagcagcccgcgacgctcatcatcaagctcagaggcaaaatcatctatcaggtagagacaccgccgcccgctttcacgggtgaggaactctccttgcgccagacgtaaggcgcacatcaacagcttaagctgcccacggcttaaggtatcttccaccggcgcaccgtcggcgcgaatgcgtaagtccgctttgtgcgggccgtgcgcggtgtaggttagctggcgatcgcgttcaaaattacgttccagcacctcagcatattctgtctctttctcccagccgcgctggaaagagaaagtcagagaaaactcagggagaaattgcttacaggtatcagccatatcggccgcgataccggcgctatactccgcgcgccaggtgctgatttgctccgccagcgggatcagctctttatcccacgggcgtagctgttcgtaacgtgtcacctggcgcagcgccgcattgcgctgcttgagcaatcgcttgagattgctccaggcggtgaaaaatccgggttcgttgtgaaagcatccccagtcgaggaatgctcttctgtatttggggccgccgttgagtaaagtaaacccttctggcgttatcaactgcattggcatcaggtgcgccagttccgcgaccttatgcccgtctgtaccgtcgatgcggactttgctgtcgccctgtttgtctttggttaagccaatcgctgtctcgcgctcttcgccctgtaatcgcccgtggagaacaaacgcctcctgctcatggcgaatgacgcgaccaatctgcaaactgcgaaacgcccgaccatggccgagcgtatagatggcttccagcacgctggttttgccactgccgttggcgcctaccagaaagttaaagccgggagataaggcgagatccgcggtttcaatgttgcggaaatcgcggatcaacaagcgggtgagggacattacagtctcattggcatgacaacataagccgcgctctggctggccgcatcttcaatctgcacgctggaaacgctatcggtcagcatcatgcggacgttttcgcatttcagcgcgttcagaacatccagcacataactgacgttgaagccgatttccatctccgcaccgctataggtaacgtcgaggatctcttccgcttcttcctgttccgggttgttggcggtgattttcagctggttttcgctgacataaagacgtacgccgcggaatttctcgttagagagaatcgccgcgcgagcaaacgcctgcttgagcagatcgcagccagcttccagatgtttgtccgggttcttcggcagaacgcggcgataatccgggaagcgaccatccaccagtttggaggtgaagataaagtcgccaacgtgggcgcgaatgttgttgctgccaatctgtacgcgcagcggattgtcgccgccgtcgagcatacgcatcagttcaatcacgcctttacgcggtacgatcacgctatggcttggcaaagattgaccaattggcatactacagaccgccagacggtggccgtcggttgccacggtgcgcagttcttcaccttcggtttcaaacagcataccatttaagtaatagcgaacgtcctgatgcgccatagaaaactgggtcgcttcaatcagacgcttcatcgttgcctgcggcagggtaaattcgacttcactctgccagtcatcgaggttcgggaaatccgccgctggcagggtagacaggctaaaacggctacgcccggagcgtaccagcatccgttcaccttccagctgcacggcaatttccgcgccttcaggcagaccacggcagatatcaaagaatttgcgcgccggaacggtcgtcgctcctggctcgtgtggctgaaccagcgcaacacgtgccaccatttccatctcgagatcagtaccggtcaggctcaacgtaccgtcagcaacctgtaacagcagattaccgagaatcggtagcgtaggacgaccacctaacggaccgctcacctgttgtagcggttttaataaatgctcacgttctacggtaaatttcataggtttagctactcaatgttctgattaaattactaaaatcttctttgatatcgtggctctcttcacgcaactgctcgatcttacggcaggcatgaagcaccgtcgtgtggtcacggccaccaaacgcatcgccaatctccggcagactgtggttagtcagctctttcgccagcgccatcgccatctggcgcggacgcgccacgctgcgggatcgacgcttggaaaggagatccgcgactttgatcttgtagtactccgccaccgtcttctgaatattgtcgatggtgaccagtttttcctgcaatgccagcaagtcgcgcagcgcctcacgcacgaagtcgatggtgatcgcccgtccggtaaagttggcattggcaatgacgcggttcagcgccccttccagctcacgtacgttagatcgtagacgcttggcgataaagaacgccacttcgcccggcaaacgaatgtcgttttcgtcggcctttttcatcaggatcgccacacgggtttccagctctggcggttcgatcgccacagtcagtccccaaccgaagcgggatttcaaacgatcctcaacgccgttgatctctttcggatagcgatcgctggtgagaatgatctgttgattaccttccagcagggcgttgaaggtgtggaaaaactcttcctgagatcgttctttattagcaaaaaactgaatatcgtcgatcagcagtgcatctacggaacggtagtagcgtttaaactcttcgatcgcgttgttttgcagggctttaaccatgtcctgaacaaagcgctcggagtgcatataaaccactttggcattcggcttgcgcgccataatgccgttacccaccgcatgcagcaggtgagttttacccagacccgtgccgccataaaggaacaacgggttataggcaccgccagggttatccgccacctggcgagccgccgcgcgcgccagttggttagatttaccttcaacgaagttatcaaacgtgtgtttgacgtttacgttagaacgataggtcggttctgccggggccgggacgttatcccaaccactgcgcgtagaaggcgcagcacgttgcggctgcgtttgcgccacctgtgcaggggccgcgacgttgctcgtcactgccgcttgtggcgtttgcgtcaccggtttggtgccgacttcaaaacgcagctgtggggcatccgctccgcagaaactggttagcagtccattgatattattaaggtacttgtcccgtacccaatcgaggacaaaacggtttggcgcgtacagggccagcgtgttatcgctcagttccgcctgcaatgggcgtatccacatactgaattctgtggctggtaactcatcctgcaatcgggcaagacactgctgccaaaggctaagactcacggcggactccactcgaacaaaagtcgataatgactaaggctgaaacattcatgattgttgacgtacgtcgaaaagaccctgcttgagggtgacgcacgaaccgctgtctgcggttatatgcccgatcaagatcctgcaaaacgatcgggaccgcggatcatagcctaaactgcgcaagagatcttctgtttctcacagattttcccgatttatccacaggactttccagaactcgctaagtgtaaacgatcctgccgcgaggcgggcacgatttacgccgcatattggaaaatttaatgaccatagacaaaaattggcttaatcgatctaataaagatccaggacgatccttgcgctttacccatcagcccgtataatcctccacccggcgcgccatgctggtttccactggtgtgaggtcgtacattttccctgcgaaaaggtgcggaaaagcgcggtaaataaggaaagagaattgactccggagtgtacaattattacaatccggcctctttaatcacccatggcttcggtgtccatcgtttcatttttcggcggatatccaataaagccattgaatttattcaagtttaggtagaaatcgccatgaaacgcacttttcaaccgtctgtactgaagcgcaaccgttctcacggcttccgtgctcgtatggctactaaaaatggtcgtcaggttctggcacgtcgtcgtgctaaaggccgcgctcgtctgaccgtttctaagtaataaagctaacccctgagtggttaagctcgcatttcccagggagttacgcttgttaactcccagtcaattcacattcgtcttccagcagccacaacgggctggcacgccgcaaattaccattctcggccgcctgaatagcctggggcatccccgtatcggtcttacagtcgccaagaaaaacgttcgacgcgcccatgaacgcaatcggattaaacgtctgacgcgtgaaagcttccgtctgcgccaacatgaactcccggctatggatttcgtggtggtggcgaaaaaaggggttgccgacctcgataaccgtgctctcagcgaagcgttggaaaaattatggcgccgccactgtcgcctggctcgcgggtcctgacttaatcggaagcgttggaaaaattatggcgccgccactgagccctggcagccgggtcctgatagccctcattcgggtctatcaacgcctgattagtccgctactcgggccgcattgtcgtttcactccaacctgtagtagctacggaattgaggcattgcgcaggtttggagtgataaaaggcagttggttgacggtgaaacgcgtattaaaatgccaccctttacaccctggtggtgacgatcccgtcccgcccggaccatttgataccagagaacactaacgatggatagccaacgcaatcttttagtcatcgctttgctgttcgtgtctttcatgatctggcaagcctgggagcaggataaaaacccgcaacctcaggcccaacagaccacgcagacaacgaccaccgcagcgggtagcgccgccgaccagggcgtaccggccagtggccaggggaaactgatcagcgttaagaccgacgtgcttgatctgaccatcaacacccgtggtggtgatgttgagcaagctctgctgcctgcttacccgaaagagctgaactctacccagccgttccagctgttggaaactagtccgcagtttatttatcaggcacagagcggtctgaccggtcgtgatggcccggataacccggctaacggcccgcgtccgctgtataacgttgaaaaagacgcttatgtgctggctgaaggtcaaaacgaactgcaggtgccgatgacgtataccgacgcggcaggcaacacgtttaccaaaacgtttgtcctgaaacgtggtgattacgctgtcaacgtcaactacaacgtgcagaacgctggcgagaaaccgctggaaatctccagctttggtcagttgaagcaatccatcactctgccaccgcatctcgataccggaagcagcaacttcgcactgcacaccttccgtggcgcggcgtactccacgcctgacgagaagtatgagaaatacaagttcgataccattgccgataacgaaaacctgaacatctctagcaaaggtggttgggtggcgatgctgcaacagtatttcgcgacggcgtggatcccgcataacgacggtaccaacaacttctataccgctaatctgggtaacggcatcgccgctatcggctataaatctcagccggtactggttcagcctggtcagactggcgcgatgaacagcaccctgtgggttggcccggaaatccaggacaaaatggcagctgttgctccgcacctggatctgaccgttgattacggttggttgtggttcatctctcagccgctgttcaaactgctgaaatggatccatagctttgtgggtaactggggcttctccattatcatcatcacctttatcgttcgtggcatcatgtacccgctgaccaaagcgcagtacacctccatggcgaagatgcgtatgttgcagccgaagattcaggcaatgcgtgagcgtctgggcgatgacaaacagcgtatcagccaggaaatgatggcgctgtacaaagctgagaaggttaacccgctgggcggctgcttcccgctgctgatccagatgccaatcttcctggcgttgtactacatgctgatgggttccgttgaactgcgtcaggcaccgtttgcactgtggatccacgacctgagcgcacaggacccgtactacatcctgccgatcctgatgggcgtaacgatgttcttcattcagaagatgagcccgaccacagtgaccgacccgatgcagcagaagatcatgacctttatgccggtcatcttcaccgtgttcttcctgtggttcccgagtggtctggtgctgtactatatcgtcagcaacctggtaaccattattcagcagcagctgatttaccgtggtctggaaaaacgtggcctgcatagccgcgagaagaaaaaatcctgattcggtgagttttcgctaaaataagggcggtcagttgaccgccttttttcttttcgtagggcggataagcaccgcgcatccgccacacaaagcaacaggaacatcatgagcgataatgacactatcgtagcccaggccacgcctccgggacgtggcggcgttggcatcctgcgcatctccggcttcaaagcccgtgaagttgccgaaaccgtgctgggtaaactgcctaagccgcgctacgccgattatcttccgtttaaagacgccgacggcagcgtgctcgatcaggggattgcgctatggttccctggcccgaacagcttcaccggcgaagatgtgctggaactgcaaggtcatggcggtccggtgatcctcgacctgctgttaaaacgcattctgaccattcccggcctgcggattgctcgccctggtgagttttccgaacgcgcgtttcttaacgataaacttgacttagcccaggccgaggcgattgccgatcttatcgacgccagtagcgaacaggcggcccgtagcgcacttaacagcctgcaaggcgcattctccgcacgggttaatcatctggtagaagccctcacccacttgcgcatttacgtcgaagcggcaattgatttccccgatgaagagatcgatttcctctccgacggaaaaattgaagcccagctcaatgacgttattgccgatcttgatgcagtgcgtgctgaagcacgtcagggtagtttgttgcgcgaagggatgaaagtggtgattgccggacgtcctaacgccggtaaaagcagcctgttaaacgcgctggcggggcgtgaagcggcaatcgtaaccgatatcgccggaactacgcgtgacgtgctgcgtgagcatatccacattgacggaatgccgctgcatatcatcgataccgccgggctacgtgaagccagtgacgaagtagaacgtattggtatcgagcgcgcgtggcaggaaattgaacaggccgaccgcgtgctgtttatggtcgatggcaccacaacagacgccgtggatccggcagagatctggccggaatttattgcccgtctgccagcgaaactgccgatcaccgtggtgcgcaataaagccgatatcaccggcgaaacgctgggaatgagtgaagtgaacggtcacgcgttaattcgtctcagcgcaaggactggtgaaggcgtggacgtgctgcgtaaccatctcaaacagagcatgggctttgacaccaacatggaaggcggcttcctggcgcgtcgtcgccacctacaggcgctggaacaggcagcggaacatctacaacagggcaaagcgcaactgttgggagcctgggcaggtgaactgctggcggaagagttgcgtctggcacagcagaacttaagcgaaatcaccggggaatttactagtgacgacctgctggggcggattttctccagcttctgtattggtaagtaaccgcgcttacgaggccgcattctgactgtcagatgcggcttcgcttcattgttaccactcctgttattcctcaaccctttttttaaacattaaaattcttacgtaatttataatctttaaaaaaagcatttaatattgctccccgaacgattgtgattcgattcacatttaaacaatttcagaatagacaaaaactctgagtgtaataatgtagcctcgtgtcttgcgaggataagtgcattatgaatatcttacatatatgtgtgaccagtaaatggttcaatattgacaacaaaattgtcgatcaccgcccttgatttgcccttctgtagccatcaccagagccaaaccgattagattcaatgtgatctatttgtttgctatatcttaattttgccttttgcaaaggtcatctctcgtttatttacttgttttagtaaatgatggtgcttgcatatatatctggcgaattaatcggtatagcagatgtaatattcacagggatcactgtaattaaaataaatgaaggattatgtaatggaaaactttaaacatctccctgaaccgttccgcattcgtgttattgagccagtaaaacgtaccactcgcgcttatcgtgaagaggcaattattaaatccggtatgaacccgttcctgctggatagcgaagatgtttttatcgatttactgaccgacagcggcaccggggcggtgacgcagagcatgcaggctgcgatgatgcgcggcgacgaagcctacagcggcagtcgtagctactatgcgttagccgagagtgtgaaaaatatctttggttatcaatacaccattccgactcaccagggccgtggcgcagagcaaatctatattccggtactgattaaaaaacgcgagcaggaaaaaggcctggatcgcagcaaaatggtggcgttctctaactatttctttgataccacgcagggccatagccagatcaacggctgtaccgtgcgtaacgtctatatcaaagaagccttcgatacgggcgtgcgttacgactttaaaggcaactttgaccttgagggattagaacgcggtattgaagaagttggtccgaataacgtgccgtatatcgttgcaaccatcaccagtaactctgcaggtggtcagccggttagtctggcaaacttaaaagcgatgtacagcatcgcgaagaaatacgatattccggtggtaatggactccgcgcgctttgctgaaaacgcctatttcatcaagcagcgtgaagcagaatacaaagactggaccatcgagcagatcacccgcgaaacctacaaatatgccgatatgctggcgatgtccgccaagaaagatgcgatggtgccgatgggcggcctgctgtgcatgaaagacgacagcttctttgatgtgtacaccgagtgcagaaccctttgcgtggtgcaggaaggcttcccgacatatggcggcctggaaggcggcgcgatggagcgtctggcggtaggtctgtatgacggcatgaatctcgactggctggcttatcgtatcgcgcaggtacagtatctggtcgatggtctggaagagattggcgttgtctgccagcaggcgggcggtcacgcggcattcgttgatgccggtaaactgttgccgcatatcccggcagaccagttcccggcacaggcgctggcctgcgagctgtataaagtcgccggtatccgtgcggtagaaattggctctttcctgttaggccgcgatccgaaaaccggtaaacaactgccatgcccggctgaactgctgcgtttaaccattccgcgcgcaacatatactcaaacacatatggacttcattattgaagcctttaaacatgtgaaagagaacgcggcgaatattaaaggattaacctttacgtacgaaccgaaagtattgcgtcacttcaccgcaaaacttaaagaagtttaattaatactacagagtggctataaggatgttagccactctcttaccctacatcctcaataacaaaaatagccttcctctaaaggtggcatcatgactgatcaagctgaaaaaaagcactctgcattttggggtgttatggttatagcaggtacagtaattggtggaggtatgtttgctttacctgttgatcttgccggtgcctggtttttctggggtgcctttatccttatcattgcctggtttagtatgcttcattccgggttattgttattagaagcaaatttaaattatcccgtcggctccagttttaacaccatcaccaaagatttaatcggtaacacctggaacattatcagcggtattaccgttgccttcgttctctatatcctcacttatgcctatatctctgctaatggtgcgatcattagtgaaacgataagtatgaatttgggttatcacgctaatccacgtattgtcgggatctgcacagccattttcgttgccagcgtattgtggttaagtagcttagccgccagtcgtattaccagtttgttcctcgggctgaagattatctcctttgtgatcgtgtttggttcttttttcttccaggtcgattactccattctgcgcgacgccaccagctccactgcgggaacgtcttacttcccgtatatctttatggctttgccggtgtgtctggcgagttttggtttccacggcaatattcccagcctgattatttgctatggaaaacgcaaagataagttaatcaaaagcgtggtatttggtagcctgctggcgctggtgatttatctcttctggctctattgcaccatggggaatattccgcgagaaagctttaaggcgattatctccagtggcggcaacgttgatagcctggtgaaaagcttcctcggcaccaaacagcacggcattatcgagttttgcctgctggtgttctctaacttagctgttgccagtagcttctttggtgtcacgctggggttgttcgattatctggcggacctgtttaagattgataactcccacggcgggcgtttcaaaaccgtgctgttaaccttcctgccacctgcgttgttgtatctgatcttcccgaacggctttatttacgggatcggcggtgccgggctgtgcgccaccatctgggcggtcattattcccgcagtgcttgcaatcaaagctcgcaagaagtttcccaatcagatgttcacggtctggggcggcaatcttattccggcgattgtcattctctttggtataaccgtgattttgtgctggttcggcaacgtctttaacgtgttacctaaatttggctaaatccttcaagaagccagccattcgctggcttcttgcctctcaggaaatcacttatgtccaaatggcaactcgcctgatcctccttcaccacgtatgctttgcgtcaccttactatcaggacgctttagcccatgtcccgctttttgatttgtagttttgccctggttttactttatcccgccgggattgatatgtacctcgttggtttaccgcgcatcgccgccgatctcaatgccagcgaagcgcagttgcatattgcgttctccgtatatctggcggggatggcagctgcgatgttatttgccggtaaagtggccgatcgtagtgggagaaagccggtcgccatacccggcgcggcgctatttattattgccagcgtgttctgtagtctggctgaaaccagcacgttatttcttgcaggccgatttctacaggggttgggcgcaggctgttgttacgtagtggcgttcgctattttgcgcgacacgctggatgatcgacgtcgggctaaagtgctgagtttactcaacggtattacctgcatcattccggtgttagcgccagtgctcggacatctgattatgcttaaattcccgtggcagagtctgttctgggcgatggcaatgatgggcatcgcggtactgatgttgtctttgtttattttaaaagaaacgcgcccagcggcccccgcagctagcgataaaccacgagaaaatagcgagagcctgcttaaccgttttttcctcagccgtgttgttatcaccaccctcagcgttagcgtgatcctcactttcgtcaacacgagtccggtattgctgatggaaatcatggggtttgagcgcggtgaatacgccaccattatggcgctgaccgctggcgtcagcatgaccgttagtttctccacgccatttgcgctgggaatttttaagccacgtacgttgatgatcaccagccaggtgttattcctggcggcggggatcactcttgccgttagtccttcccatgcggtttctctgtttggtatcacgctgatttgcgccggtttcagcgtaggttttggtgtggcgatgagtcaggcgttagggccgtttagtttacgcgcgggcgtagccagcagcaccttaggtattgcgcaggtttgcggtagcagtctgtggatttggctggcagcggtggttggtatcggcgcatggaatatgctgatcgggattctgattgcctgtagcatagtgagcctgttgctgattatgttcgtcgcgcctggacgccccgttgccgctcatgaagaaatccatcaccacgcttgatctcaatctgctgctttgtctgcaactgctgatgcaggagcgcagcgtaaccaaagcggcgaagcggataaacgtgacacctagcgcggtgagtaagagcctggcaaagttaagagcgtggtttgacgacccgctctttgtgaacagtccgctgggtctgagccccacaccgctgatggtcagcatggagcaaaatctggcggagtggatgcaaatgagcaacctgctgctggataaaccgcaccaccagacaccgcgcggcctgaagtttgagctggcggcggaaagtccgctgatgatgatcatgcttaatgcgctgagcaaacagatctaccaacgttacccgcaggcgaccatcaaattacgtaactgggattacgattccttagatgccattactcgtggtgaagtggatatcggtttttccggtcgcgaaagccatcctcgcagccgggagctgttaagcagcctaccgttagccattgattatgaagtgctgtttagtgatgtgccctgcgtctggttacgcaaagatcatccggcactgcatcaaacgtggaatctggacaccttcttacgttatccgcatatcagcatttgctgggaacagagcgatacctgggcgctggacaatgtgttacaggagctgggacgcgaacgcacgattgctatgagcctgccggaattcgagcagagtctgtttatggcagcgcaacccgacaatctgctactggcgaccgcgccgcgctactgtcagtactacaatcaactccatcaactgccgttggttgctcttcctctcccgtttgacgaaagccagcaaaaaaagctggaagttccttttaccctgctgtggcataaacggaacagccataatccgaagatcgtctggttacgggaaaccattaaaaacctttacgcgagcatggcataaccgaatcgtatgaaacgcgacccaatttcacaataaaatgtaaaaaagttgtaataagcttgtctgaatcgaacttttagccgctttagtctgtccatcattccagtaaatgattactcttgtattcataatggaccattaagcatggagcgaaaaatggcgactcactttgcccgagggattttaacggaaggacatctgatttctgttcgtctcccctcccagtgtcatcaagaagcccgaaacattccccctcatcgtcaaagccgttttctggcgtccagaggtttactcgcagaactgatgttcatgctgtatggcattggcgaattgccggaaatcgtcaccctgccgaaaggtaaaccggttttcagtgataaaaatttgcctagcttttccatttcctatgccgggaatatggttggcgtggcgttaacaaccgaaggtgaatgtggcctcgatatggaactacagcgtgcgacgcgcgggtttcatagcccacacgcgcccgataaccacaccttttccagcaatgaaagcctatggatcagtaaacaaaacgatcctaacgaagcgcgggcgcagctcatcacgctgcgccgaagcgtgctaaaactaaccggtgatgttttgaatgacgatccgcgcgatctgcagctgctgcccattgccggacgcctgaaatgtgctcatgtaaatcatgtagaagcgttatgcgacgcggaagacgtgctggtgtggtccgtggcggtcacgcccacgattgaaaagctcagtgtctgggagttagatggcaaacacggctggaaaagcctgccggatattcacagccgcgccaacaatcctaccagccggatgatgcgttttgcccaactctctaccgtgaaggcttttagcccaaattgatagacaaccacaggagtcatcatgtctgaaaaattgcaggtggttacgttactggggagcctgcgcaaaggcagttttaatggcatggttgcacgtaccctgccgaaaattgctccggcgagcatggaagtcaatgcgttaccatccattgccgacattcccttgtatgacgctgacgtacagcaggaagaaggttttccagcaacggttgaagctctggcggaacagatccgtcaggctgacggtgtggtgatcgtcacgccggaatataactacagcgtaccgggtgggctgaaaaatgccatcgactggctttcccgcctgccggatcaaccgctggccggtaaaccggtattgattcagaccagcagtatgggcgtgattggcggcgcgcgctgtcagtatcacctgcgccagattctggttttcctcgatgcaatggtgatgaacaagccggaatttatgggcggcgtgattcagaacaaagttgatccgcaaaccggagaagtgattgatcagggtacgctggaccacctgaccgggcaattgaccgcatttggtgagtttattcagcgagttaagatctaaataaaaaacccgccagcaatcatgcatggcgggtttttaacgcgctatcgattttagtgagcgtcgataaagacaatcttcaggataaacagcagcgcaacgatgattacgcacgggcttagatcacgcagacgtccggtaccgattttcatcacgcagtaggagataaagcccagcgcgataccttcggtaatgctgaagctgaacggcatcatcacggcggtaataaacgccggaacagattcagtaagatcctgccagttcacgcgtgccagactggaagtcatcagcacgccaacgtaaatcagcgcaccagctgcagcgtagcctggcaccatccccgccagcgggctcagaaagataaccagcaggaacagcagaccaacaaccactgccgtcagaccggtacgaccgccaacgcttacgccggaagaggactcaatataagccgtaacggaagaagtaccgataaagctaccggtcacggaagagatactgtcgacatacagcgcctgcttcatgcgcgggaatttccccttctcatccgccagacctgctttatcggtcacgccaatcagcgtaccggaggagtcaaacaagttgaccaacatgaaagagaaaatcacccctgccagcccgaggttaaagctcccggctaaatctacatgacccacaactgtcattacgctcggcggcgcagaaacgatgccattgtagtgcacatcacccagcatccagcccagcagcgtcgtcaccacgatagaaaccagcaccgctgcgtgaatgttgcggctggccagaatagcaatgatgaagaagccgaggatacccagaagtacgctgtgagaagtcagattaccgatgctcaccagcgtttccgggttagcgacaatcacacctgcgtttttcagccccatcatgccaatgaacagaccgataccgctggtaatacccacacgcagactcaccggaatgttggctatcatccagtagcgaacgcggaaaatcgtcagtaacagcagacctatcgcgccccagaagattgcgcccatcccgacctgccacggcaagcccatcgcctgtacaacgacaaaagcgaagaacgcattcaggcccatagcgggtgccagtgcaactggcaggttagcaaacagtcccatcataatactgccgaatgcagcgatcagacaggtagtgacgaagacggcgctggtatccatgccagcaacgccaagaatttgcgggttaacaaaaacgatgtaaaccatcgtcaggaaggtggtaaaaccggcgatcacttcggtccgtgccgtcgtgccatgttcgcgcagtttaaacacgcgttccagcatcccctgaccagaagtctgggtggtatgttgatgactcattatctatttccgaacaaggagggaaaatccgtcgctatcgtataccaaaatgcgacaataggcgcgtttgtgagagacttttttattggatttacttatacggcaacgattgcgttgcgcaaatcggctctacgaaaacgttaaactgattaaaaaggaaaggcatgtcccggatagaagcggtatttttcgactgcgacggtacgctggtcgacagtgaagtcatttgctctcgcgcatatgtaacgatgtttcaggaatttggtattacgctcgatcctgaagaggtattcaaacgtttcaaaggtgtaaaactgtacgaaattatcgatattgtttcccttgaacatggtgttacgttagcgaaaacagaagctgaacacgtttaccgtgcagaagtcgctcggctgttcgatagtgaactggaagccatcgaaggggctggagcgctcctgagtgcgatcactgcgccaatgtgtgtggtatctaacggcccaaataacaaaatgcagcattctatgggcaagctgaatatgttgcactacttcccggataaactgttcagcggctacgatattcagcgctggaagccagacccggcgttaatgttccatgcggcaaaagcgatgaatgtaaatgtagaaaactgcattctggttgatgacagtgttgccggtgcacaatctggtatcgacgcaggtatggaagtgttctacttctgcgccgacccgcacaataagccgatcgttcacccgaaagtcaccacctttacccatcttagccagttacctgaactgtggaaagcgcgtggttgggatattacggcataattcttcacactcccttcacttaccccgcttaaattggcgctcaaaggtaagtaaagggagtttgatatgtctgttagtcgtcgggtaatacatcacggactttattttgcagttttaggaccgttaattggtgttctgtttcttgtcctctacatattcttcgcaaaagaaccgctggttctttgggtgataatacatccaatttttctcttattgagcataactacgggagctattcctgcgttgttaaccggtgtaatggttgcctgtctgccggaaaagatcgggagtcagaaacgttatcgttgtctggctggtggcataggtggcgtcgttatcaccgagatctattgtgcagttattgtacatattaagggcatggcttccagcgagttgtttgaaaacattctttctggtgacagtctcgttgtccgcatcattcctgcattgctggcaggtgtggtgatgagcagaatcattacccgtctacccggattggatattagttgtcctgaaacagactctttaagttaagcgggatactttatctttgggctactcaaaagcagacaggatgtttctatgactcaaaatatcaggccgttaccccaattcaaatatcatcccaagccactggaaacaggcgcatttgaacaggataaaaccgtagagtgcgattgctgtgaacaacagacgagtgtttattacagcggtcccttttattgcgttgatgaagttgaacatctctgtccgtggtgtattgcggacggttctgctgctgaaaagtttgcaggtagttttcaggatgatgccagcatagaaggtgttgaatttgagtatgatgaagaggacgaatttgccggtattaagaacacatatcctgatgaaatgctgaaagagttggttgaacgcacgccaggttatcatggatggcagcaggaattctggctcgcgcattgtggcgatttctgtgtttttatcggctatgtgggctggaatgatataaaagatcgcctcgatgaatttgccaaccttgaagaagattgtgagaatttcggtattagaaattctgatctagctaaatgcctgcaaaagggtggtcattgtcagggttatctcttccgctgtctccactgcggcaagctgagactgtggggtgattttagctaattatttaaataatgagaacaggccggagcgtaattcacacatccggccttatttcttaagcttaaccgagtgctaattctgcggcagcggctttatcagcgattaccatcaggctaggatgcagctgcaacacggaagctggaacatcttcggtaaccggaccttgcagaacatttttcagtgcctgcgctttacccgcgccgctgacaattatcagcaagtttttcgccgccatgatgcttttcggccccatcgtcacgtagctgtcaggcactaagctaaagtcgccgcccaactcgccatgcgccacaatatcaaccatctctccctggatcgggaactccacggtttgctcatggaaatgggtcgtattcggcaaattgccacaaaaatgaccatctgcacctaatcccagcaccaccaaatccagtccgccttcacgcgccagtttctgatcatgctcgcggtagttatcaatagtgagcttctggatattctcttctttgatccccgcaggggtgaaaaacagattacgcagattggtaatcgttacgccttctccctctttgccgcgaaatggaatttcatcaaaattatagaaatagcagttatcgtaccagggcttacctttaaccagggtggtgaggtattcatacatgcctttgggcgtgctaccggcggtaattgccaggttaacacgacgcgtcttgctcatataaccaagcagatggtgtgccgcgacacggctcatttcctggtaatcttcggtaatgattaatttcatcttaatgccttattttatttaaataatttctgtacaaaggctgcataggctggtcgccagacatccatttcatggttcagacccggatattcctggtaatcaaagttaatttttttctgctcaagctcagttttcagcccggcgatatccttgccggttacgacatctttatcccccacaaccacagtaaaattacgtagttgctggttgatagctgccggatcgttcagtcgggccgcgacaccttcatccggtacggttgtcgtggtaacaccactgaatgtggccagccagccaaagctttccagatgattcattccggaaaccagcgcctggtacccgccttgactaagccctgccagcgcgcggccatcggcatctttacggacattaaaacgcttgctaatcagcgggataatatcgttcatcagttcgcgatctgccgctttagcattcagcggataaaagactttacgtctttcctgaggcacgaaatcttcgggaataatgcccttcgcatcggtttctgtatccgggatcaccaccagcatcggtttaattttcccttcagcaagcaggttatccatgatttgcgggatacgcccctgatcgatagcggaacgtccggtatcaccaaagccgtgatagaaatagagcactggcaaaggctcgcccatgccggtgtatcctggcggggtccagacatacatctgacgttcagattgcaatgcgttggagtggtaagttatggcgatcaaatcaccatgcgcaacagaacgcgtatccagataactgcctggcaccagaatcatactggagttaacctggcgctgaggattagtcattgcggtgcctgtatcaatgctgcgtacaccatcaacattgaaaaaatactcgtacaggttgcctttcaggataggtgtgcgccagctccagactcctgcttcgtctttggtcatcgggtgaatattgtccggaaccggaacacccaccactacagagacattttttgccccaggggcaaagtagcgaaaggtcacgctgttatcggcattgacctgagtcacatactgtttcaccgggatagtgggtgccgggctggctggcatatccgctgctatggcccactgagcagaaataccgctggcaatagccagcgttaaagcagcaatttttatattcatcgtaatattcctttcattaagttccattaccaccagatttcagcctgggcaccgacagcaaactggtcgtctttattgtcttcaaaggtgaagccatccagttcgttttccagggctttgatatacgtggcgtagaaacgaatttccggacggctggtcaacatactggtattgactttaaaggtatggaagagcgtggttttataaccagactcattaaatttattactattcgcatctttgttttgctgggtgaaatagcccagttcaacacctgtctggttatattggtcccaaatataggccgggcgaacaaccgcacgaatagattcgaaatcagagtgggcgcctgtttcgtagctatatatatcgttaccgaaggagtaaacaatcgcgttagctacaatgaaatgatcgccaatataggcttcgccctggctagtcagacgtaccgctgttccgccggtgtgatcaccataataacgaccattaaaggtggtaaatggacttgcgccagcataacggccaaagttactggcgatagagttattcgcgaccaggaaggagaattcgttgaagccacctttatcaaatttctgcgttaaagatgtgccaaacatccaggtatctttccagtcataatacccgttattatcctgattatctttttcgcttgcgctttcgtttgccgtgacataacgaccacttaccattaaggtggctttatcccataacgggatatctttatagcgtaaatcaatggtattggtattaatctgctgtttgttttgcaggctgcgatcgtaatcatcgacatcttcgcgaaccagcgcgatatcaattttacccggaccgactttccagttttccagacctacacccgctgcggcatcagtacgctgcgttttccagtcaagcatctggatttcaattttcggcgcaccgtgtttacccacccagaaatcagcctctggcgcaaagggcaggaaacctttggtggtaacgtacatatcggagaactgcatatagttctcgccaccggcgttatcgccaaaccagccggtagagtactgctgaccaacgttaccatccatcatcacaacggcatcaacccgtttgccgttttcgttgtagacacgttgttttaactgcaaatcaaaccagccggagtattcgttaccaaagcggcccagagaaccaatcgcccaacttttaggactaccatgagaggcggtcccccaaccagaacggtaatagccgttgtaactaaagccaatttcatctttcacaaatttactgaaatctttcagagtcatggaagaataaatgctgcctgtctcactggcatttttctcttcatttttgaccagtacagcatcaggttttgcggcactactggtcgggaacggattggcggcatacccttgatcattcgtacttacgctacgattcaccgtcgctggcgtatactttttcttctcttcatctttatactttttgagttcgctttgcgtttctcttaacgccttttctaataactcaaggcgttgttccaccgttaaactttcagccaaactttgtgcagaaaaggctaacggtgccattaataagatggcagaggtaataagatttcgtctaaacataatatccctttatggtgcaaagaaagaattaacgcatcgcatccagactgttctgaatgcgacgataattaaggtgctttaatggttattttttttaaactcagcccccgcgtcttgatcacctctgcataccatccgaagcttttcttgcgtgttcttgtgaggcttccttcgccattatcatcacgatccacataaataaagccgtagcgcttagacatttgactatgagatgcactgactaaatcaattggcccccaactggtgtaccccataatatccacaccatcggcaatcgcttcatttacctgtaccaggtgatcgtttaaataggcaattcgataatcgtcctgtatgctaccatccgcttcaacgctgtcttttgcgcctaatccgttctcgacaataaataacggtttttgataacgatcccaaagcgtatttaacagaacccgtaatccaaccggatcaatttgccacccccactcactacttttcagatgcggattggggatcatattcagtatgttgccctgcgcatttttattaatgctttcgtcgtgggaaacacaaccagtcatgtaataactaaaagagatgaaatcgacggtatgttttaaatcttctgcgtcactttcagtcatctcaatggtgatattgtggtcgcggaagaaacgctgcatatagccgggatactggccacgcgcctgaacatcaccaaagaacatccagcgccggttctcttccatggcctgcaacatatcctgtggctggcaggtgagggggtaaaccagcccaccgagaagcatattgccgattttcgcttcggggagcaggctatgacaggctttaactgcccgcgcactggcaaccagttgatggtggatagcctgataaacttccgcctcgccactctcttctgccagccccacgcccgtgaatggcgcgtgtaagctcatgttgatttcattaaacgtcagccataacgccactttatgttggtagcgagtaaagaccgtgcgggcgtaatgctcgaagtgatcgatgaccgctcgattagcccaaccgccgtagtttttcaccagcccatatggcatttcgtaatgggataacgttaccagcggcttgatccccgcctgcgccatttcatcaaacagccgatcgtaaaacgctaaccccgcttcattcggttcgacttcgtcgccctgagggaaaattcgcgcccaggcaatggaaatacgcagacaggtgaagcccatctcggcaaataacgcgatatcttccgggtaacggtgataaaaatcgatggcgacatctttgatattctctttccccaggatgcgcggttccatttttcccattacgccatgaggctgtaaatcactggtgctgatccctttgccatcttcctgccaggcaccttccacctgattggcagctgttgcgccaccccaaagaaatgtttctggaaatgctttcataattaactccttttatcgttagcgaatgatggataacagcggttcacctgcgcttatctgcgccgtgccgtggggtaatacgtccgtaaaatcatcgctattactgattaataccggcgtcgtcagatcaaatccggcctcgcgaatagcagggatatcaaaagaaatcagccgatcgcctgtattgaccttgtcacccacgttgacgtgagcggaaaagaatttgccgtccagttttacggtgtcgataccgacatgaatcaggatctccacaccatcatcactctcaatgccaatggcgtgtaatgtggcgaacaagctagcaattcgacccgcaaccggagaacgcacttcaccaacgctgggcagaatggcaatacctttacccaacaggccactggcaaacgtggtatcagcgacgtgaatgagcggcacaatctctcccgtcatcggactacagataccgccctgctcaggtggtgtaataacctctggtgttttctcttgcggggcaccctgcgctggctgacgtttagcggtgatgaaatgaagcatcaccgtaccgacaaatgcgcaaccgatggcaatgacaccgccaataacgctggcccagacggtgaaatcaattcccgtactcgggatggtttgcatgaaggtgaaaatacttggcaaaccaaaggagtagactttcgtttgcgcgtagccaataatggtggccccccaaagccccactgatacaggcgataacaaaggggtacttacgcggcaggttgacgccatataccgctggttcggtgataccaaacagactcgtcaacgccgcacttcccgccaccacttttttctgcgcatcgcgttcgcagaggaagacgccgagcgccgccccgacctgcgccataatggcgggcattaacagcgggatcatggtgtcgtagcccagcacggtgaagttattgatacacagcggcaccaggccccagtgcagtccgaacatgacgaagatttgccagaagccgcccattaccgcgcccgcaaatgcaggaaccgcctgataaagccagagataaccggcggcaatcagttcgcttatccaggtacttagcggccccaccagcagaaaggtgacgggtgtgataaccatcagacatagcaatggtgtgaagaaatttttgattgcgctcggtaaccacgcattaagtcggcgttccagaatgctgcacaaccaggcagaaaaaataatgggaataacgctactgctgtaattcaacaatgtgaccggaatacccaggaaatccagccccagcgcatccgctttttgcccgttctcgaaagcagtcagaattaatggatgcactaacgctccaccaatcaccatggcagtaaatggattaccgccgaagcgtttccccgcggtgtatcccaggattatcgggaagaaccaaaacaaggcatcactggcgctgaataaaattaaataagtaccactttgttcggtcgtccactgaaaagtgagcgccagagccagcatacctttcaagatcccggttgccgccatcaaaccgatcagaggcgtaaaaataccactaataacataaacaaagcggtttagcagattacctttatcatcattttccggtgcctgttgcgctttttcgtcaaggcctgccacactgttaaccgccaggaagacatcggccacatggttacctatgaccacctgaaactggccaccgctttccaccaccataataataccgggggtctttttcagtacctctgcttgcgctttgctttcatcctttaatttaaaacgtaatcgcgttgcgcaatgcatcagactcacaatgttatctgcgcccccgactcctgcgactatttttctggctaactccgtcataacttgccctctaccgctttgcggcaaaactccaaaaaaaaacctgaaaaaaacggcctgacgtgaatcaagcaatttttttcaggttttgcccgcttagtgcggtaacaatcctttactcagtaataatatttcagtgttctttgcgcacgcgctctatatttatggctaaaaacataatctctgcgggactaattttacgttgatactgcaaaccaataaaaatggcgatccgttccgcacattgccatgcttgcgggtaattttgttttactgcttgttgtaaactttcatcactatcgttaatactagcatgttcaagaatacgccaggataaaaacttcagatgtgtaaccagtcgctgataactcaagctttcttcctggtaattaaggctgaactgaaattttattaattgcagcatttcgcgcattaactgcgtgacacctgcaacatcctccatatttccgctcatttgggcactgaccagatgcatggcaataaagcccacttcatctttcggtaactgcacgcccaaccgtttatcaataatggttaacgcttcttcccctagctggaactctttcgggtaaagccgctggatatcccacagcaacgggttgggcagcaacacgttttgctgaaagcgtttaatcgcaaactggcaatggtcagttaggctgatataaatactgtcctgtaattttcccaagcgctcctgcgctaaagagataatacgatcacaggttgccatcacctcaagaggaatatgacttaagagttcgcttaatcgcccgttcagttcatgactgctcaaggcatactctttttctattccactactgttaattctttcgccagcgcgtttttgaaagccaattccgcgccccatgacgactttttcccgctgttgatcatcaataaccaccacaacattattgttgagaattttggtgatttgcatgttcatagcaaggaccttttttataaacaaaaaaacccgacttcaccagtattctctggttatgtcaggttttgcctgcgaatgcagtaacaatccagtcatttattaatggtttttataacgaacatccaggttcggaaattaatttaattgcgtgcagagaaaatagcaatgcgctattgataaaaatatgaccatgctcgcagttattaactttgtgtaattttaggaatttataaagttatatataacaaatcccaataattaagttattgggatttgtctggtgaattatttgtcgctatctttccccgccagcagtttatccagctcatcgccaccgacgtgacggaaatcctgccccttcacgtagtagaagataaactcacaaatattctggcagcggtcgccaatacgttcgatagaacgcgcgcagaacagcgcagtaagtacgctcggaatggtacggctatcttccatcatgtaggtcatcagttgacgaacaataccttcgtattcctgatcgacttttttatcttcacgataaatacgtaccgcttcgtcaatgtccatccgcgcgaacgcgtccagcacgtcgtgcagcatctggatggtatgacggcccaggctctccagacttaccagcaacggctgatgctgctgggagaatttctccagcgcagtacggcagattttgtccgccacgtcgccaatacgctccagctcggcaatggttttactgatcaccataaccagtcgcaggtcgctcgccgtcggctgacgtttggcgataatgcgcacgcaggcttcatcgatcgccacttccatcatgttgacgttcttgtcgccttcgatgacgcgcttcgccagatcgctgtcctggttatgcatcgcggtgattgcatcagaaagctgctgctccaccatgccgcccatggtcatcacctgcgtgcggatactttccagttcggcgttgaactggccggaaatatgtttattaagattgagactgtccataacgcactcctgaatcaaccgtaacgaccggtgatgtagtcttctgtttgtttcttcgctggcttggtgaacagatcgtccgtgttgctgaactcaatcaattcgcccaggtacataaacgccgtgtggtcggaacaacgcgcagcctgctgcatgttgtgggtgacgatcaccacggtgtaatcctgcttcagttcggtgatcagctcttcaatacgcccggtagagatagggtcgagcgcgctacacggttcgtcgagcagcagcacttccgggcgaatggcgataccacgcgcaatacacagacgctgttgctgaccaccagagagagagtaaccgctctggtgcaatttatctttggtttcgttccacaatgcggctttggtcaatgcccactgcacgcgctcgtccatgtcggcacgggagagcttctcaaacagacgaacgccaaaagcgatgttgtcgtagatggacatcggaaacggcgtcggtttctggaacaccatgcccactttcgcacgcagcagtgcgatatcctgagagttggtcaggatgttgtcgccatcaagcagaatttcaccttccgcacgctgctccgggtacagttcaaacattttgttgaaggtacgcagcagcgtgcttttaccgcagccggacggcccgataaacgccgttacctggtttttagcgatatccaggttgatgtttttcagggcatggaatttgccgtagtagaagttcaaattacgaacctgaattttactcggggcagtttcaaccatactcattgcaatcttttcctcatcgtgcctgatgcacttcgctaatcaggcttaccgtaggccggatcaggcgttcacgccgcatccggcaaagtgttaaccgtgtacagagtcaaaaaggcgctcggtcggtcccctcgcccctctggggagagggttagggtgaggggaaaaccgtgtcagcaatatcaaccgtgtttattcttcgcaaaaacaacgcgcgccagaatgttcagcagcagtacgcacagggtaatgatcaataccccggcccaggccaattgctgccattccgcaaacgggctcatcgcaaacttaaagatcgtcaccggcaggttggcgatcggctgcatcatgtccgtgctccagaactggttggagagcgcggtaaacagcagcggcgcggtttcaccagcaatacgggcaatcgccagcaggataccggtcataatcccggacacgctcgctttcagcgtaatcgcagagatcatcttccacttcggtgtacccagcgcataagccgcttcacgcaggctgtacggcaccagtttcagcatgttctcggtggtgcggataacaatcggcacctgcaacaacgccagggcaatcacgcccgcccagccggagaagtgctccatctgcgccaccacaatggtgtaaacaaacagaccaaccacaatgctcggcgcagagagcagaatgtcgttaatgaagcgaatcacttctgccagccaggatttacgaccatattccgccagataaatccccgccataatgcccagcggcgtaccgaataccgtggcccacaaaattaacagcccgctacccgccagagcgttcgccagaccaccaccttccgtattgggcggcggcgtcatttcagtgaacagcgccaggctcataccgtcgataccgcgagtgatggtggacattaaaatccagatcagccagaacaggccgaaggccatcgtcgccatgctgagcgtcagcgcaatacggtttttgaggcggcgacgcgcctgcattttgcggcgagattcagccagcgccgcagtggtttgcatttcaaccatagccattagcgtgccccctcattcttagccaggcgcataatcataaacttgcttgcggcgaggacgatgaaggtaatcacaaacaggatcaggcccagttccatcagtgcggcaacgtgcagaccggattccgcttccgcaaattcgttcgccagcgcagaggtgatactgttgcccggcatatacaggctggcgctgtcgagctggtaggtgttaccgatgataaaggtcaccgccatggtttcaccgagcgcgcggcccagccccagcatgatgccgccgataacaccatttttggtgaacggaagaacgatacgccagataacttcccaggtggtgcagccaataccgtaggcgctctctttcatcatcaccggggtttgttcgaacacatcacgcattaccgccgcaatgtacggaataatcatgatggcgaggatcacgcctgccgcgaggataccgataccaaatgcggggccagagaacagcgcgccaacaatcgggatattgctcatgatattgccgaccggctcctgaaagtaaacggcgaacagcggcgcaaagataaacaggccccacatgccgtaaacgatacttggaatggctgccagcagctcaatggcgatacccagcgggcgtttcagccagccaggcgcaagctcagtcaggaacagggcgataccgaaactcaccgggacggcgatcagcagcgcgataaagctagtcaccaacgtaccgtagatcggcaccagcgccccgtagatatcgttcggtgcatcccactctttggtccataggaaagccagaccaaatttctgaatgctcggccaggaggagatgatcagagagacaataatgccacccaacatcaatagcacaatcagcgccgccagttttaccagcacgctgaaaattatgtcgccctttttacccggtgggttaaaagcaggcttggttgcagccataagttactcttcagttaaacgcgtttacaaagtcattttgtaatgccggatgcggcgtaaaacaccgtacccggcctggagttttattagtacagcggcttaccgctactgtctttaatattggtcttccacgcagcgcgaacctgttcaactacactatccggcaggctggcgtaatccaggtcgttcgcctgtttagccccggttttgtacgcccagtcgaagaatttcagcacttctgtgccttgttctggtttcttctgatctttgtggatcagaatgaacgtggtagaggtaataggccatgcatcttcgcctttctggttggtcagatcctgagcgaaggttttgctccagtctgcaccttttgctgcattagcgaagttttcttcggtcggactaaccggtttaccatcagcggagatcagtttggtgtacgccaggttgttctgcttcgcgtaagcatattcaacataaccaattgcacccggcagacgctgaacgaacgcggcgataccgtcgttacctttaccgcccagaccgatcggccattttacggtagagccagtaccaacgttgtttttccactcttcgttcactttcgccaggtagctggtgaagacgaaggaagtcccggagccatctgcgcggcgtactacagcaatgttttgactaggcagtttcagacccggattcagtttggcgatggcttcatcatcccacttcttgattttgcccaggtagatgtcgccgagggttttaccatccagcaccagttcgccagacttcagccctggaatgttaaccgccagcaccacgccgccaatcacggtcgggaactggaacagaccttcctgagccagtttttcgtcagacagcggcgcgtcagaggcaccaaaatcaacggtattagcgataatctgttttacgccaccggaagaaccgataccctggtagttaactttattaccggtttctttctggtaagtgtcagcccatttggcatacaccggcgcagggaaggttgcacctgcacctgtcaggcttgcttctgcaaacacagagaaagcactcatgcttaaggtcgcggcgacaacagttgcgacggtggtacgcataactttcataatgtctcctgggaggattcataaagcattgtttgttggctacgagaagcaaaataggacaaacaggtgacagttatatgtaaggaatatgacagttttatgacagagagataaagtcttcagtctgatttaaataagcgttgatattcagtcaattacaaacattaataacgaagagatgacagaaaaattttcattctgtgacagagaaaaagtagccgaagatgacggtttgtcacatggagttggcaggatgtttgattaaaaacataacaggaagaaaaatgccccgcttacgcagggcatccatttattactcaaccgtaacgctttttgccaggttacgcggctggtcaacgtcggtgcctttgatcagcgcgacatggtaagccagcagctgcagcggaacggtgtagaagatcggtgcaatcacctcttccacatgcggcatctcgatgatgtgcatgttatcgctacttacaaaacccgcatcctgatcggcgaagacatacaactgaccgccacgcgcgcgaacttcttcaatgttggatttcagtttttccagcaattcgttgttcggtgcaacaacaataaccggcatatcggcatcaattagcgccagcggaccgtgtttcagttcgccagcagcgtaggcttcagcgtgaatgtaagagatctctttcaacttcaatgcgccttccagcgcgattgggtactgatcgccacggcccaggaacagcgcgtgatgtttgtcagagaaatcttctgccagcgcttcaatgcgtttgtcctgagacagcatctgctcaatacggctcggcagcgcctgcagaccatgcacgatgtcatgttcaatggaggcatccagacctttcaggcgagacagcttcgccaccagcatcaacagcacagttaactgagtggtgaatgctttagtggatgccacgccgatttctgtacccgcgttggtcattagcgccagatcggattcgcgcaccagagaagaacccggaacgttacagattgccagactaccaaggtaacccagctctttgctcagacgcaggccagccagggtatccgcggtttcgccagactgactcaaggtgatcatcaggctgttacgacgcacggcagatttgcgatagcggaattcagaggcgatttcgacgtcgcacggaatacctgctaggctttcaaaccagtagcgggaaaccataccggagttataagaagtaccacaggcgaggatctgaatatgctcaaccttgctcagcagttcgtcggcgttcggtcccagctcgcttaaatcaacctgaccgtggctgatgcgtccggtaagggtgtttttgatcgcgttcggctgttcgtagatctctttctgcatgtagtgacggtaaatgcctttatcgcccgcgtcatattgcagattggattcgatatcctgacgttttacttccgcgccagttttatcgaagatgtttacgctacggcgagtgatttccgcaatatcgccctcttcaaggaagataaagcgacgggtcaccggcaacagcgccagctggtcagaagcgataaagttttcgcccatccccaggccaatcaccagcggactaccagaacgtgccgccagcagggtatccgggtgacgggagtccatgatcactgtaccgtacgcaccacgcagctgcgggatagcacgcagaacggcctcacgcagagtcccgccttgtttcagctcccagttcaccagatgggcaatcacttcggtgtcggtttcagaaacgaaggtatagccacgcgcttttagctcttcacgcagcggttcatggttttcgatgatgccgttatgcaccaccacaatgtgttcagaaacatgcggatgcgcattcacttcactaggttcaccgtgggtcgcccagcgagtgtgagcaataccagtgccgccatgcagaggatgttcttccgctgcctgtgccagcatctggactttaccgaggcgacgcaggcgggtcatatgaccttctgcatcaacaacggccagaccggcagagtcatatccgcggtattccagacgacgtaaaccttcaagaaggatttctgctacatcacgttgcgcgatcgcgccaacaattccacacatagtttttgattccgatttatatcgttgtcggtcaacctgtatgcccgttttttcgggcgccccgagccttgtagagagtggggttatttttatagttactgcttgtgggagggagattatgttatctcctcatcccatgtgaccgggttagccggccagaatcactttttctttaccggacgacgccagccttctttctgagtctgcggcacacggctgatagctaatgcattttcgccgacattacgcgtcacagttgtacccgcagcaatggtcgcgcctttgcctactgttaccggggccaccagctgagtgtcggaaccaacaaacacatcgtcgccgataatggtcttaaatttattcgcaccatcgtagttgcaggtaatggttcccgcgccgatgttaacgttatcgccaatttccgcatcgcccaggtaagtcagatgaccagctttgctgcctttacccagacgcgcttttttcatctcaacgaagttaccgacgtgagcaccttccagcaactcagcaccaggacgcaaacgggcaaacgggccaatggtacaggccgctgccagattcgcatcttccacaacggtatacggactgatttcgcaatcatcgccaatcacgctgtttttaatcacgcaaccggtgccaattttcacgcgatgaccgagagtcacgttgccctcgatgataacgttagtatcaatttcaacatcgcgcccgtgagttagcgtaccacgcagatcaaaacgcgctggatcgcgcagcataacgcctgctaacagcagtttttcagcctgttcggactgataaacacgctccagacgggagagttgcaggcggttattcacgccttctacttcgcttaaacgttgcggatgaacggcgacgatttcacgcccttcctgatacgccagcgcaataatgtcggtgatgtagtattcgccctgagcattattgttggtcagcttcgccagccagcgtttcatatctgcgccgttggcaatcagaatgccggtgttgatctcctgaatctgacgctgctcgtcggtggcatctttgtgctcaacaatgccggtaactttgccgttttcacgggtgatacgtccataaccggtcggatcatccagtttcaccgtcagcagaccaatgccaccctgcggtttagcatcacgcagacgctggagtgtttcgacagagatcagcggcacgtcgccgtagagcattaaaatgtcttcatcatcggcaaagaaaggtgcggcctgctgcattgcatgacccgtacccagctgctctgcctgaagcacccagttaaggttgtcgtctttcagcgcctgttttagcagatcgccgccgtgaccgtacaccaggtgaacgtgcgctgcgcctaattcattcgcagcatcaatgacatgctgaaccatcgctttcccggcaagggtatgcagcactttcggaagatcggaatacatgcgcgtgcctttgcctgcggcaaggatcactacgctcatagcattattcaacatacgcgtcctgactgtaatttgagaacgaatttaaaccgcttcaccttgaaaaaactacatttttttcatcgtgaaatggacagaggataaattgttcaataacggattatccccgctgacgaaagcgccattttcgaccatcgtcacgccttttgtctgcagaaaattaaggcagtaccttaatttaagcgtcaggtggatgtttttgctcttatttcgatcaatgaataaacaggaaaacaggggggttttatatcagcaggatctatgtgaacgctattcaggacgggtcacacgcgcaaaaaaaagccagcctgtttccagactggcttttgtgcttttcaagccggtgttacatcgcttttttggtcaactcgataacgcgcagctgcgcgatcgctttggccagttccgcagacgcctgagcgtaatctacgtcgccgtgagagctgctaatgtgctcttcagccttacgtttcgcttccatggctcgcgcttcgtcgagatcctggccgcgaattgcggtgtcggccagaacggtcacgttgccaggctgcacttcaagaatgccgccagacagatagataaactcttcgtgaccgtgctgtttcacgatgcgaatcataccaggcttaatggcggtgagcagcggtgcgtggccagggtagatccccagttcaccttcgctacccgttacctggattttctcgaccagaccagagaacatttgttgctctgcgctgacgacgtccaggtggtaagtcattgccatatcaccctccgattaaggcgttaaagttttttggctttttccacagcttcttcgatggaaccgaccatgtagaacgcctgctccggcaggtgatcgtattcgccttccatgatgcctttaaagccacggatggtgtctttcagggagacgtatttacccggagaaccggtgaatacttctgccacgaagaacggctgggacaggaagcgctggatcttacgagcacgcgctaccaccagtttgtcttcttcagacagttcatccatacccaggatggcgatgatgtctttcagttcctgataacgttgcaggatggactgaacgccacgcgcggtgtcgtagtgttcctgaccaaccaccagcgggtccagctgacggctggtggagtccagcgggtcaacggccgggtagatacccagagacgcgatctgacggctcagtaccacggttgcgtcaaggtgcgcaaaggtggttgccggagacgggtcagtcaagtcatccgcaggtacgtatactgcctgtacggaggtgatagaaccagttttggtggaggtgatacgttcctgcagaacgcccatctcttccgccagggtcggctgataacctaccgcactaggcatacggcccagcagtgcggatacttccgtaccggccagggtgtaacgatagatgttgtcaacgaacagcagaacgtcacgaccttcgtcacggaatttctcagccatggtcagaccggtcagagcaacgcgcagacggtttcccggcggctcgttcatctggccatacaccagggatactttgtcgataacgttggagtcggtcatttcgtggtagaagtcgttaccctcacgagtacgttcacctacgcccgcaaacacagagtaaccggagtgctcgatcgcgatgttacgaatgagctccatcatgtttacggttttacctacacccgcaccaccgaacagaccaactttaccgcccttagcgaacggacacatcaggtcgataactttgataccggtttccagcagttcctgagagttactcagctcttcgtaggaaggtgctgcgcggtgaatcgcccaacgctcttcttcaccgatctcgcctttcatgtcgaccggttcacccagtacgttcatgatacggcccagagtcgctttacctaccgggacttcaatcgggtgttcgaggtcttttacatccagaccgcgacgcagaccgtcggaggaacccattgcgatggtacgtacgataccgccgccgagctgctgctgaacttccagcaccagacgctcattaccattttgcacctcaagagcatcgtacacgcgcggtacggcatcctgagggaattcgacgtcaactacggcgccgattacctggacaatctttccagtagccatcttaaatcctctacgaaataacctgtttaaaccgcggcggccccgctgacgatctcggtgagttcctgagtaatgctggcctgacgagctttgttgtataccaactgcagctctttaatcaggctgccgccattgtcggtcgcggctttcatcgccaccatacgggcggcctgctcgctggccaggttttcaaccacgccctgataaacctgagattcgacataacgacgcagcagggtatccagcaacgccttcggatcgggttcgtacaggtaatcccaggatttatgtttcagatcatcatcatcacttgccggtaacggcagcagctggctgatggtcggaacctgagacatggtgttaataaatttgttgctgacaatgtaaagcttgtccagacggccttcgtcgtaggcctgcaacatcacttttaccggaccgatcagttcggacagggaagggttatcccccatgccggtgacctgggcaacaacattgccgcccacggagttgaagaagctcacgcctttgctgccgatcattgcgaggtcgcattgaacgcctttgtcggtccaggtcttcatttccgccagcagttttttgaacaggttaatgttcaaaccaccgcacaaaccacggtcggtgctcaccaccaggtagcccacgcgtttaacgtcgcggtcttccaggtaagggtgcttatattccagattaccgtgtgcaaggtgaccaatcactttgcgcatggtttctgcataaggacggctggccgccatgcgatcctggcttttacgcattttggaagcggcgaccatctccatcgctttagtgatcttttgcgtgttctggacgcttgcgatcttactacgtatctcttttgcgccggccatgagcttctcctcaatgccttgcggcctgccctaaggcaagccgccagacgttaccaggattgggttgctttgaaggaatcgaggatgcctttcagcttgccttcgatttcgtcgttgtagccaccggtctggttgatctcttgcatcaacggagcgtgatcacggtcgacgtaagccagcagagcggcttcgaagctgccaattttgctcagttcaacatccgccaggtaaccacgttctgctgcgaacagaaccagagactgctgcgcaacggacatcggcgcatactgtttctgtttcagcagttcggtcactttctgaccgtggtcaagctgcttacgtgttgcatcgtcaaggtcggatgcaaactgagagaacgctgccagttcacgatactgtgccagagcggtacggataccaccggacagttttttcatgatcttggtctgtgctgcaccaccaacacgggatacggaaatacccgggttaaccgcaggacgaataccggcgttgaacaggttggtttccaggaagatctgaccatcggtaatggagattacgttggtcggaacgaacgcagaaacgtcacccgcctgagtttcgataatcggcagtgcggtcagagaaccggttttccctttcacttcacctttggtgaaggcttcaacgtattcggcgttaacacgtgcagcacgctccagcagacgagagtggaggtagaaaacgtcgcccgggaatgcttcacgtcctggcggacgacggagcagcagggagatctgacggtaagcaacagcctgtttagacaggtcatcgtaaatgatcagcgcatcttcaccgcggtcacggaagtattcgcccattgcgcaaccggcatacggtgccaggtattgcagtgcagcggattcagacgcggttgctaccacaacgatggtgttagccagtgcgccgtgctcttccagtttacgtaccacgttagaaatggtggacgctttctggccgatagcgacatagatacatttgataccggaatcgcgctggttgatgatggcatcgatagccagtgcggttttacctgtctgacggtcaccgatgatcaattcacgctgaccacgaccgattgggatcatggagtcaacggctttataaccggtctgtaccggctgatctacggactgacgttcgataacgcccggagcgattgcttctacagcagagaagccgtcgtgatccagcggacctttaccgtcgattggtgcacccagagtgttaaccacacggcccagcaggccacggccaaccggaacttccaggatacggccagtacacttaactttcatgccttcggcaaggtcagcgtacggacccataacaaccgcacctacagagtcgcgctcgaggttcagtgcgatagcgtaacggttacccggcagggagatcatttcaccctgcatacaatcggccaggccgtgaatgcggataacaccgtcacttacagaaacaatagtaccttcgttgtgagcttcactcacaacattgaactgagcaatgcgctgcttgatcagttcgctgatttcggtggaattcagttgcatgctccagtccccttaagactgcaagacgtctgcaaggcgctcaagacgaccgcgtacgctgccatcaatgaccatatcacccgctcggatgataacgcctgccattacagacttatcgattttgcaattcagcttaactttgcgactcagacgtttttccatcgcagcagaaattttcgcgagctgttgttcactcagtgcggcagcggaaatgacgtctacctcagcggtagcctcactcacggcacgcaggtgaataaactgctccagaacatccgggagcgcgttaagacgaccattttcagccataacccgaatcaggttctgaccgttttcgtccagttgctcaccacaaactgcgataaagctctcggcgagcgtttctggcgcaagcgcgccagagagaagctctgccatttgttcgtttttggttacctcggcggcaaacgccagcatgtcctgccagcgttctacactttggtgttcgacggcaaagtcaaaagctgctttggcgtaggggcgagctaccgtaataaattcagacatcagcccctccctccttacagttcagcgacaagtttatccacgatgtcgctgttagcagcttcatccacggaacgttcgatgatcttctcggcgccagcaacagccaggatagcaacttgcttacgcagctcttcacgggcacgtttacgctcggcttcaatttccgcctgcgcctgggccacgattttagtacgttcctgttctgcctcagctttcgcttcgtccagaatctggctgcggcgtttgttcgcctgctcgatgattacctgggcttccgctttcgcttttttcagctggtcggtcgcgctggcctttgcaaggtcaaggtccttatgtgctcgttctgcggaagcaaggccgtcagcaatttctttttgacgtttttcgatggctgccattaatggcggccatacgtacttcatgcagaacagaacgaacaggacaaacgcgatggcctggccgaggattgttgcgttaagattcacagcacaatgcctctatttagttaacgttctgatattgctctttaaataaaagcaacgcttattacgcgacagcgaacatcacgtacagacccagacctacagcgatcatcgggatagcatccaccagacccataacgataaagaactgagtacgcagcagaggaatcagatcaggttgacgcgctgcgccttccaggaatttacccccgaggatgccgataccgatcgcagcaccgattgccgccagacccatcatcacagcggcagccatgtacagcagatccatattcaggttttccatgacagtctccagtttgtttcagttaaaacgtagtagtgttggtaaattaatgttcttcagacgccatgctcagatagacgatcgtcagaaccatgaagatgaaggcttgcagcgtaatgatcaggatgtggaaaatggcccacggcacattcaggatccactgactccaccacggcaacagaccagcaatcagaatgaaaatcagctcaccggcatacatgttaccgaacagtcgcaaaccgagactaactggtttggacagcaggcttaccccttcaaggattaagttgacaggaatgaacgcccagtgattgaacggctgcagcgtcaactctttcgtgaagccgccgatgcctttcattttgatgctgtagaacagaatcaggataaatacgcccagtgccatagacagcgttacgttcacgtccgcagacggaaccacacgcagtgcaggcagacccagtacatgttcagcaatgtacggcagcaggtcgataggcagtaaatccatcaggttcatcaggaatacccagacgaagatcgtcagggccagcggagcaatcagcttgcttttgccatggtacatgtctttcacgctaccattaacaaagccgatcaccagctcaatcgcggtctgaaacttacctggcacaccgctggtcgcctttttggctacgctacggaataaaaccaggaacaacagacccagcaccacgctgaagaacatggagtcaatattgattgtccagaaggtggctggggggttttgtggatccaccaggctgaatgtacgcaggtccagctgaaggttattcaggtggtgtcctatgtaatcctgcggcgtcatattttcactagccatgatgccttttaccctttgttgttaattacagccggtgccagtatctgaaccaccagcaccaaaacccacgtaacgatcagcggcaagaataccgcctttaaaaccgccaacgccaccaccagtaacaccaacatcgccagaactttgaaagcttcgccaaatgcgaatgtccaggccacccggcctttcgctggtgtatgcgcctggtgacgccaggcaaatatcataaacaaaacgttaggcagaaagactgccaggcccccgcttattgcagagacgccccagaaggggtctttgaggctgaacagcaatccacttgctatcaccaccagtaactgaacgagcagaagcttccgagcaacgtttcgactcacgaggctcacagacatcacgtttttcactcctgctcccttcgaggtatgccgcgtgtcgtataaaactttctttaaggcttagagtcaagcatcaaaaagcggtcaaattatacggtgcgcccccgtgatttcaaacaataagtagccaaaaggtgaataaatgtttaaatatttttccagtgcatacaattgcgacttttctgctaaccctgttcgatcatgaaaaactgtaaataacgcgtaaacactggtgataaagcgtgcttcagatcacatattgcgcatgttcgcgcacagcatatttatttacttggcaaatgatgcctttgcaagtttatgatatttcagtctaaaaacagatactgttttaataaatgacatttacacaacaaaaaccacccattgacatttttaataatgttttaacagccaatgatggttcttagcgccgatttttagcagactgatattttcactaatgacttattttctgcttaccaaaaaaagccacgttatcttgttgatgcaaaagagtgaacgtggcgttaaatgtaaccagttatatcagtagaaaacctggttgttgttaacagtctaaccggtcaattttttatgatttttttgataaaaattaaattttatttgctttaatcaccaccagatgacgttcgccatccagggctggaacctgaagtttaaccacactttcgacctgatattcttcgggcaacaaagcgatttcatcttccggcatttgccctttcagcgcgtagaaacggccttgctcaccaggaagatggtggcaccagctcaccatatcgttcagagaggcaaaagcgcggctaattacgccatcaaatggcggctcactaggaaactcttctaccctgctctgtactggttcaatattctccagtttaagctcatgttgcacctgacgaaggaaacgcacgcgtttaccaaggctatccaacagagtgaaatgggcttcaggacgcacgatagagagtggaatgcctggcagtcctggtccggtgccgacatcgataaaccgttcaccttgcagatacggtgccaccacaatgctatcgagaatatggcgtaccagcatctcattaggatcgcggacgctagtcaggttgtacgctttgttccatttatgcagcatattcacgtaggcaataagctggtttttctggtgatcggtaaggctaatacctgcgtctttcagcagtaaggagagtttgttgagcacggtgattacctgttcttgatgcgttgcctggtaagcgggtgcttaccaggcatttttaatgcgttatgcgctacgacgcagcataccctgttttttcagccacaccagcagaatggagatggccgcaggcgtgacgccagaaatacggctagcttggccgatagaggctggtttgtgatcgttaagtttggcgatcacttcgttagaaagaccggatacctggcggtaatccagtgtcgcgggtagcagggtgttctcgttacgcagctgcttttcgatctcatcttgctggcgcgcgatataaccttcgtatttaacctgaatctcaacctgttccgccgcctgttcgtctgtcaacgcaggggcaaacggcgtcagcgtggttaatttttcataagtcatttccggacgacgcagcagatcttcaccactggcttcacgggaaagcggcgcagtcaggtgagcattcacttcggctgcagcttccgcgctcggggttacccaggtgcttttcagacgctgacgctcacgctcgatattctcaagtttctcgttaaagcgcgcccaacgttcgtcatccaccaggcccagttcacgaccgatttcagtcaaacgcagatccgcattatcttcgcgtagcatcagacgatattctgcgcggctagtaaacatacgatacggttctttggttcctaaagtgcacaggtcatcaactagtacgccgagatacgcctgagaacgtgccggagcccaaccttctttgtcagcagacagacgggcagcgttaagaccggccagcaaaccttgcgcagcggcttcttcgtaaccggtagtgccgttaatctgaccagcaaagaacagcccctggataaacttgctctccagcgtcggtttcaggtcgcgaggatcgaagaagtcatactcaatggcataacccggacgcacgatcttcgcgttttccatcccctgcatagagcggacgatttgcatctgcacatcgaacggcaggctggtggagataccgttcggataaatttcattagaggtcagtccttccggttcaaggaagatctgatgctgatttctgtcggcgaagcgcatgactttgtcttcgatgctcgggcagtagcgtgggccgacaccttcgatcacccctgcgtacattgggctacgatcgaggttactgcggatcacatcatgggttttctcgttggtatgagtgatataacacggcacctgctggggatgctgggacgcattgcccataaagctgaataccggcattgggttatcgccatgctgttgcgccagtacgctaaagtcgatggttcgagcatcaatacgcggtggtgtcccggttttcagacgaccaacgcgcagcggcagttcacgcaaacggcgagaaagcggaatggacggcggatcaccagcacggccaccgctgtaattatccagaccgatatgaattttaccgtcgaggaacgtcccaacggtgagcacgacggctttggcacggaacttcagtcccatttgggtaacagcaccgaccacgcgatcgttttcgacaataagatcttcaaccgcctgctggaagatcatcaggttcggttggttctccagcgccgtacgtaccgcctgacggtagagcacacgatccgcctgagctcgggtagcgcgaaccgccggtcctttgcttgcgtttagtatcctaaactggatacccgcctgatcgatcgctttcgccatcagaccgccgagtgcatccacttcttttaccagatgtcccttcccaataccgccgatcgccgggttgcagctcatctgccccagagtgtcgatattgtgtgtcaaaagcagagtctgttgacccatacgcgccgcggccatcgcggcctcggtgcctgcatgacccccgccaatgatgatgacgtcaaaaggatccggataaaacatggtgattgcctcgcataacgcggtatgaaaatggattgaagcccgggccgtggattctactcaactttgtcggcttgagaaagacctgggatcctgggtattaaaaagaagatctatttatttagagatctgttctattgtgatctcttattaggatcgcactgccctgtggataacaaggatccggcttttaagatcaacaacctggaaaggatcattaactgtgaatgatcggtgatcctggaccgtataagctgggatcagaatgaggggttatacacaactcaaaaactgaacaacagttgttctttggataactaccggttgatccaagcttcctgacagagttatccacagtagatcgcacgatctgtatacttatttgagtaaattaacccagcttcccagccattcttctgccggatcttccggaatgtcgtgatcaagaatgttgatcttcagtgtttcgcctgtctgttttgcaccggaatttttgagttctgcctcgagtttatcgatagccccacaaaaggtgtcatattcacgactgccaataccgattgcgccaaagcggactgcagaaagatcgggcttctgttcctgcaatgcttcatagaaaggagaaaggttgtccggaatatctccggcaccgtgggtggagctgataaccagccagatcccactggcaggtaaatcttctaacagcggaccgtgcagcgtttcggtggtaaaacccgcctcttccagcttttcagccaggtgttctgctacatattcggcaccgccgagggtgctgccgctgataagagtgatatctgccataaaccgccacctttattaagagtggcgtattgtacgctgtgaacgcgttgggatctacctgtggaaaagtatgggattaaaaaagccgatcagggcttgatggtacgcatgatcgggttttgcaggacgatcaatgtctcggtggactgaatttcatcaattgtttggatcttgttgataagtacatgctggagagcgtcgatgctacggcacatcacttttataaagatgctgtagtggccggttgtgtaataggcttcagtgacttcatcaaggctttccagctttgccagcgcggaagggtagtctttggcgctctttaatataatgccgataaagcagcctacgtcataaccgagctgcttcgggctgacatcaatacgcgccccggtaatgatccccgcctgcttcattttctctactcgaacgtgaatcgtccccggactgacgccaaattgtttcgccagttcggcgtaagcggtgcgcgcattgcccattaatgcttccaggatgccacggtccagattgtcgatcagataattttccataggattttcttatgcggattgatgattcattctattttagccttcttttttaatgaatcaaaagtgagttaggctttttattgaatgattattgcatgtgtgtcggtttttgttgcttaatcataagcaacaggacgcaggagtataaaaaatgaaaaccgcttacattgccaaacaacgtcaaattagcttcgtgaaatctcacttttctcgtcaactggaagaacgtctggggctgatcgaagtccaggcgccgattcttagccgtgtgggggatggcacgcaggataacttgagcggctgtgaaaaagcggtgcaggtaaaagtgaaagctctgcctgatgcccagttcgaagtggttcatagtctggcgaagtggaaacgtcagaccttagggcaacacgacttcagcgcgggcgaagggctgtacacgcacatgaaagcccttcgccccgatgaagaccgtctttctccgttgcacagcgtctatgttgaccagtgggactgggaacgcgtaatgggcgacggtgagcgtcaattcagcactctgaaaagcacggtagaggcgatctgggcgggaattaaagcaaccgaagctgcggttagcgaagagtttggcctggcaccgttcctgccggatcagatccacttcgtacacagccaggagttactgtctcgttatccggatcttgatgccaaagggcgtgagcgggcgatagcgaaagatcttggcgcggtattccttgtcgggattggcggcaagctgagcgatggtcatcgccacgacgtgcgcgcaccggattatgatgactggagcaccccgagtgagctgggccatgcgggtctgaacggcgatattctggtgtggaacccggtactggaagatgcgtttgagctttcctccatggggatccgtgtagatgccgacacgctgaagcatcaactggcgctgaccggtgacgaagatcgcctggagctggagtggcatcaggcgctgctgcgcggtgaaatgccgcagaccatcggcggcggtatcggccagtctcgtttgactatgctgctgctgcaactgccgcatatcggccaggttcagtgtggagtatggccagctgctgttcgcgagagcgtcccttctctgctgtaataatttatcgccgccagcgtctgagcaggcggcttcgcatcccggtatcaaagcgccagatatgatcgaaaatgcgcatgatgccgggtttgccgtgtgcgctcatcgccacggcatgaaagcgatgctgatgtacccgctgcagctctttcactttactcgtcacgtcgtcaggcaaccgctgagcgataaaatcagaaatcaccaccgcatcggcatcaaaccattccctgctttgcaagcgttccataatggcgcgaaaacaactggcaagatcggtgccgccacgaaactgctggcttaaaaaacggattgcttgttcgatgccttgtgggccactaagctcataacggacgatctcggtggaaaatagcataatatagcagcgccggttttctgcgagagcaatgcgcatcaaggccaggcagaacgctttcgcacactgttcattaaagccgcccatactgccggaagtatccacacagacaataaacggcccgcgcggctgttcatcgtaatctttatgtaccaccggacgttcgatcactttttcacgccagctctcaccgtgcaggcgataggtgagcaactgtttttccaccagccgacggtaaaactcatactccagttccgttatccctagtgtcgccagttctggcggcaggagacgtaaaatatcatcgctttgttgcagaccatcaacctgctcaggaaccgtcgccggttcgcgcaccatggtgcggaaggtttccatctgcgcatcgttgcgcggtatacttttggcttcccgagaacgccccagctgctctgccaggcgtttcagttccggctgttcgttaagaaattcaccgtatttcacaatcaactgatagtcgccacgtttaagctgaccggcgctcatatcccacagacgaccagctgcagtattgttatctgcgagaatcggttcaagttgtccgctcagcgtcatgcgttcctgaacttcactcaacagttgttcgcgttcttcttctaatagctgttgatttaacgtcgttgcttgcacgatcagacttaaacgccaacgctggagaaaaagcgtgtgtaacgcactagtgatcgtgctgttagcatcaaccaactgtcgggcttgttctgcccatggagaattcagacgatgcagtaagtccaggatctgtggtagctgcacaataaactgtggcgtggagaggagctggctttgctgatagcacatcacctcttcggtgagttccggcgggactcgggcatctttcagccgactgcgcagcgcttcacgccagcggggaacatcatcagtgattgccgccttcaggcgtgggaatttttcaaagaagaccgccagctgcggactggccagcagtgcgatgatcatctcttcgatcaatccctcttcgctgacggccagcatcacattaagcgtatccagcgttagcattgttgtgcctggcgaatctgtgcaccgacatcctgtaggctggcttcaatgcgacctaaccagtcgccagggataaacagacatttttgctgttcgctgaataaagcgtgttgcttgcgccagtcgctttcaagctcttccagttgttgttttatttcaccaggcagaccttcagcgctactaccgggaagtgccagcgtactgccttgtaaacttacatcgcgaacgacaagatgttgggcgctatcaacttccagattcagtttctgggcaaagccgataccgttcagtttaccgcgaatttcaccacctttgctcagccactgttccagcgcgctacgctcaaaggagatatgaaccacttccatatcatgcagttttaacggtttttgcagcagtagagtcagagtggaagcagtaacgttaacaggaagttgatactgctgacgacggctgaaaatgccgcccagacgaattaccgttaaggctgttttatcgctttgttgctgctggagttgcaggtgacgttgcacaatcgcgccaaggcgagtcaacatcccttgctgttgccaggcgtgaccggtcatcaatacatcaatttgttgttgtatcaaattcaggctttgcgcgtcataccacaggcaatctttcagcaaaatgagatctaccggggcaacagcactgcgaccgctaaaaaaggcgctggcctgcaataatcggatcgcttttttccagcgacgatcgctgacataaggcgcatccggtaatttatccagttgctggcgcagcataaaaatcagctcaaatacatgatcgggcagcgtaatttcaccaatctctttctgccagcgttcatattcttcatctgtgacctgcaaggcatcaggaaccggattgtcgttttcatcctgttgactggtcagcatggagcggaaattcgctttatcctgcactttatctaaccacagacgaatcagcatgcggtcatataacgcttccagactgctgtctgcttccggcagctcgttggaggccgccaccagcagacgcatcgggattttttctacgtgtgcaccgttgcggaactggcgctcgttaatggcggtgagcaaggtattaagaattgccgggcccgctttccagatctcatccagaaagacaatttctgcttccggcaggtaaccgctggttaaacgttcatagcgcccttcatcttttagcgcctgaatagaaaggggaccaaaaacttcttccggcgtggagaagcgggtcatcagatattcaaacgcgcgggcattctgaaaggcgaattttaagcgccgggcgatcaaacttttggcaatacctggcgggccaaggaggaacacactttcaccacttaatgccgctaataaacacaagcggatggcgtggctacgttcataaagccccttttccaagctactgctcaggcgggaaattctttccgctaataaatgagggtgagccataatgaagtggcgtcctttcgtcaaaagttctgcgtaaattgcgagtatagacgtttcttgctggtggctaaaatagtctcaaagggggggtatttttctttgagccaggttaatgtggccgcatttaggagtacgattttgccgttaatcgtgcatactgtgcgcttttttgtgggccaagggactaagcacacatttcatatttcaacgaaagactagtctatgagcactgataataagcaaagtttgcccgcgattaccctcgcggcgattggagttgtctacggcgatattggtaccagcccgttatatacacttcgtgaatgtttgtccggccagtttggttttggcgttgaacgcgatgccgtgtttggctttttaagcctgatcttctggctgctaatctttgtggtttccattaaatatctcaccttcgtgatgcgggcagataacgccggtgagggggggatcctgacgttgatgagccttgccgggcgtaatacgagcgcgcgaaccacaagtatgctggtgattatggggctaatcggcggcagctttttctatggtgaagtcgtcataacacccgctattagcgtgatgagtgccattgaaggtctggaaatcgtcgccccgcagctggatacctggatagttcccctcagtattatcgttctcactttattatttatgattcaaaaacatggcacggctatggtcggtaagctgtttgcgccgatcatgctgacctggtttttgattctggcaggactggggttacgtagcattattgctaacccggaagtgctgcatgcgctgaatccaatgtgggcggtgcatttcttccttgaatacaaaacggtttcttttattgcattaggggcagtggtgttgagcattacgggggtcgaggcgctgtatgctgatatggggcactttggtaagttccctattcgcctggcgtggttcaccgtcgtattaccttccttgacccttaattacttcggtcagggagcgctgttgttaaagaacccggaagcgattaagaacccgttcttcctgttggcaccggactgggcgctgatcccgctgctgatcatcgccgcactggcgacggtaattgccagccaggcggttatctctggcgtcttcagtttgacgcgtcaggcggtacgtctgggatatttgagcccgatgcgcattattcacacctccgaaatggagagtgggcaaatctatattccgtttgtgaactggatgctctatgtcgcggtcgtgattgtgattgtcagctttgagcactccagcaacctggcggcggcgtacgggattgcggtgaccggaaccatggtgctgacgtctattctcagcactaccgtggcacgtcagaactggcactggaataagtattttgttgcgctgatcctgattgctttcctttgtgtcgatattccattgttcaccgctaacctcgataaactgctctccggcggctggttgccattgagcctcggtactgtgatgtttatcgtgatgaccacctggaagagcgagcgtttccgcttgctgcggcggatgcatgaacatggtaactctctggaagcgatgattgctagcctggagaaaagtccgcctgttcgcgtgcccgggaccgcggtgtatatgagccgtgcaatcaacgtcattccctttgcgctgatgcataaccttaaacataacaaggtattgcatgagcgggtgattctgttaactctgcgcaccgaagacgctccatatgtccataacgtccgtcgggtacagattgaacaactgagccccactttctggcgcgtggtggcaagttatggttggcgagaaacgccaaacgtagaagaagttttccaccgctgcggtctggaaggattaagttgccggatgatggaaacctccttctttatgagccatgagagcttgatcctcggcaaacgcccgtggtatttgcgtctgcgcggcaagctgtacttgctgctgcaacgtaatgcgctgcgtgcaccagatcaatttgaaatcccgccaaacagggttatcgaactgggtactcaggtcgaaatctaacgccagacgcctcctttcttcataagggggcgtttttgttttcatggttaatcaccatgtaaaacgtttcgaggttgatcacatttccgtaacgtcacgatggttttcccaactcagtcaggattaaactgtgggtcagcgaaacgtttcgctgatggagaaaaaaatgaaaaaaggcaccgttcttaattctgatattagtagcgtgatctcccgtctgggacataccgatacgctggtggtgtgtgatgctggtttacccatccccaaaagtacaacgcgtatcgatatggcattaacccagggtgtaccttcttttatgcaggtgctgggcgtcgtcacaaatgaaatgcaggtcgaggcggccattatcgcggaagagatcaaacaccataatccgcaactccacgaaacgttgctcactcaccttgagcagctgcaaaaacaccagggaaataccattgaaattcgttacaccacgcatgaacaattcaaacaacaaaccgcagaaagtcaggcggtaattcgcagcggagaatgttctccgtatgcgaatatcattctctgtgctggcgtgacgttctgaggccgtcatggaagcattacttcagcttaaaggcatcgataaagccttcccgggcgtaaaagccctcagcggcgcagcgttaaatgtctatccgggccgcgtgatggcgctggtgggcgaaaacggcgcgggtaaatccaccatgatgaaagtgcttactggcatctatactcgcgatgccggtacgcttttatggctggggaaagaaacgacatttaccgggccaaaatcttcccaggaagccgggattgggattatccatcaggaactgaacctgatcccgcagttgaccattgccgaaaacattttcctcggtcgtgagtttgttaatcgctttggcaaaattgactggaaaaccatgtatgccgaagcggataaattgctggctaaacttaacctgcgctttaaaagcgacaagctggtgggcgatctttccatcggtgaccagcaaatggttgaaatcgccaaagtgctgagctttgagagcaaagtcatcattatggatgaaccgaccgatgcgctgaccgataccgaaaccgaatccctgttccgcgtcatccgcgagctgaaaagccaaggccgcggtattgtctatatctcccaccgcatgaaagaaatcttcgagatttgcgatgacgttaccgtttttcgtgatgggcaatttattgctgagcgcgaagtggcaagtctgaccgaagatagcctgattgagatgatggtgggtcgcaagctggaagatcaatatccgcacctggacaaagcgccgggagatatccgcctgaaagtcgataatctctgcggacctggcgttaacgatgtctcttttactttacgcaaaggcgaaattcttggcgtctctggtttgatgggcgcaggtcgtaccgaactgatgaaagtgctctacggcgcactaccgcgcaccagcggttacgtcaccctggatgggcatgaagtcgttacccgtagtccgcaggatggcctggcaaacggcattgtgtatatctccgaagaccgtaaacgtgacggtttagtgttgggcatgagtgtaaaagagaacatgagcctgacagcgctgcgctacttcagccgcgctggcggcagtttgaagcatgccgatgaacagcaggctgtgagtgatttcattcgtctgtttaatgtgaaaactccgagcatggaacaggcaattggtctgctttccggtggcaatcagcaaaaagtggcgattgcccgcggtctgatgacacgccccaaagtgttgatccttgatgaacctacccgtggcgtagatgtcggcgcgaaaaaagagatctatcaactgattaaccagttcaaagccgatggcttgagcatcattctggtgagtagcgagatgccagaagtattaggcatgagcgatcgcatcatcgtcatgcatgaagggcatctcagcggggaatttactcgtgagcaggccacccaggaagtgttaatggctgccgctgtgggcaagcttaatcgcgtgaatcaggagtaaaaaaatgacaacccagactgtctctggtcgccgttatttcacgaaagcgtggctgatggagcagaaaagccttatcgctctgctggtgctgatcgcgattgtcagcacgttaagcccgaactttttcaccatcaataacttattcaatattctccagcaaaccagtgtgaacgccattatggcggtcgggatgacgctggtgatcctgacgagcggcatcgacttaagcgtaggttctctgttggcgctgaccggcgcagttgctgcatctatcgtcggcattgaagtcaatgcgctggtggctgtcgctgctgctctcgcgttaggtgccgcaattggtgcggtaaccggggtgattgtagcgaaaggtcgcgtccaggcgtttatcgctacgctggttatgatgcttttactgcgcggcgtgaccatggtttataccaacggtagcccagtgaataccggctttactgagaacgccgatctgtttggctggtttggtattggtcgtccgctgggcgtaccgacgccagtctggatcatggggattgtcttcctcgcggcctggtacatgctgcatcacacgcgtctggggcgttacatctacgcgctgggcggcaacgaagcggcaacgcgtctttctggtatcaacgtcaataaaatcaaaatcatcgtctattctctttgtggtctgctggcaagcctggccgggatcattgaagtggcgcgtctctcctccgcacaacccacggcggggactggctatgagctggatgctattgctgcggtggttctgggcggtacgagtctggcgggcggaaaaggtcgcattgttgggacgttgatcggcgcattaattcttggcttccttaataatggattgaatttgttaggtgtttcctcctattaccagatgatcgtcaaagcggtggtgattttgctggcggtgctggtagacaacaaaaagcagtaataacgactacaggacatcttgaatatgaacatgaaaaaactggctaccctggtttccgctgttgcgctaagcgccaccgtcagtgcgaatgcgatggcaaaagacaccatcgcgctggtggtctccacgcttaacaacccgttctttgtaagcctgaaagatggcgcgcagaaagaggcggataaacttggctataacctggtggtgctggactcccagaacaacccggcgaaagagctggcgaacgtgcaggacttaaccgttcgcggcacaaaaattctgctgattaacccgaccgactccgacgcagtgggtaatgctgtgaagatggctaaccaggcgaacatcccggttatcactcttgaccgccaggcaacgaaaggtgaagtggtgagccacattgcttctgataacgtactgggcggcaaaatcgctggtgattacatcgcgaagaaagcgggtgaaggtgccaaagttatcgagctgcaaggcattgctggtacatccgcagcccgtgaacgtggcgaaggcttccagcaggccgttgctgctcacaagtttaatgttcttgccagccagccagcagattttgatcgcattaaaggtttgaacgtaatgcagaacctgttgaccgctcatccggatgttcaggctgtattcgcgcagaatgatgaaatggcgctgggcgcgctgcgcgcactgcaaactgccggtaaaagcgatgtgatggtcgtcggatttgacggtacaccggatggcgaaaaagcggtgaatgatggcaaactagcagcgactatcgctcagctacccgatcagattggcgcgaaaggcgtcgaaaccgcagataaagtgctgaaaggcgagaaagttcaggctaagtatccggttgatctgaaactggttgttaagcagtaattttaatcaggttgtatgacctgatggtgacataaatacgtcatcgacagatgaacgtgtaatataaagaaaagcagggcacgcgccaccctaacacggtggcgcattttatggacatcccgaatatgcaaaacgcaggcagcctcgttgttcttggcagcattaatgctgaccacattcttaatcttcaatcttttcctactccaggcgaaaccgtaaccggtaaccactatcaggttgcatttggcggcaaaggcgcgaatcaggctgtggctgctgggcgtagcggtgcgaatatcgcgtttattgcctgtacgggtgatgacagcattggtgagagcgttcgccagcagctcgccactgataacattgatattactccggtcagcgtgatcaaaggcgaaagtacaggtgtggcgctgatttttgttaatggcgaaggtgagaatgtcatcggtattcatgccggcgctaatgctgccctttccccggcgctggtggaagcgcaacgtgagcgtattgccaacgcgagtgcattattaatgcagctggaaagtccactcgaaagtgtgatggcagcggcgaaaatcgcccatcaaaataagactatcgttgcgcttaacccggctccggctcgcgaacttcctgacgaactgctggcgctggtggacattattacgccaaacgaaacggaagcagaaaagctcaccggtattcgtgttgaaaatgatgaagatgcagcgaaggcggcgcaggtactgcatgaaaaaggtatccgtactgtactgattactttaggaagtcgtggtgtatgggctagcgtgaatggtgaaggtcagcgcgttcctggattccgggtgcaggctgtcgataccattgctgccggagatacctttaacggtgcgttaatcacggcattgctggaagaaaaaccattgccagaggcgattcgttttgcccatgctgccgctgcgattgccgtaacacgtaaaggcgcacaaccttccgtaccgtggcgtgaagagatcgacgcatttttagacaggcagaggtgacgcttggctacaatgaaagatgttgcccgcctggcgggcgtttctaccagtacagtttctcacgttatcaataaagatcgcttcgtcagtgaagcgattaccgccaaagttgaagcggcgattaaagaactcaattacgcgccaagtgctctggcgcgtagcctcaaactcaatcaaacacataccattggcatgttgatcactgccagtaccaatcctttctatagtgaactggtgcgtggcgttgaacgcagctgcttcgaacgcggttatagtctcgtcctttgcaataccgaaggcgatgaacagcggatgaatcgcaatctggaaacgctgatgcaaaaacgcgttgatggcttgctgttactgtgcaccgaaacgcatcaacctagccgtgaaatcatgcaacgttatccgacagtgcctactgtgatgatggactgggctccgttcgatggcgacagcgatcttattcaggataacagcttgctgggcggagacttagcaacgcaatatctgatcgataaaggtcatacccgtatcgcctgtattaccggcccgctggataaaactccggcgcgcctgcggttggaaggttatcgggcggcgatgaaacgtgcgggtctcaacattcctgatggctatgaagtcactggtgattttgaatttaacggcgggtttgacgctatgcgccaactgctaagtcatccgctgcgtcctcaggccgtctttaccggaaatgacgctatggctgttggcgtttaccaggcgttatatcaggcagagttacaggttccgcaggatatcgcggtgattggctatgacgatatcgaactggcaagctttatgacgccaccattaaccactatccaccaaccgaaagatgaactgggggagctggcgattgatgtactcatccatcggataacccagccgacccttcagcaacaacgattacaacttactccgattctgatggaacgcggtagcgcttaattactcgctttcacttggaacgcggttcggcttagatttacgctgtcttttgatcaaattattaccatcggttgttttcagaagcatgaacattgctgcactagcaacagtaataatgcccattgtgataaacgtatagtggaattgttcgacagtcgttgtgccttccattccttcataaacgcgaaggacggccgcacttacagcaacgcctaaactaatgctcagttgctgcgtgaccgccagaacactgttaccgctgctggcattgtcatcggtcagatcggcaagtgtgatggtattcatcgcggtaaactgcgtgctcatagccatccctaatataaacaacggcaagatcagcatccatatagccattgctggactttgcaaagagaactgagcgatcattagcccaataatcaccgtgatccccactaacgtatggcgatagcccagacgacgtaagacttgggtaaccatgctttttgcaataatggaacctaacgctgtcggtgccatcatacagccagcaataaacgcctgataaccaaatcctacctgtaacatcaatggcataaggaacggtacacagccggtccccagacgggttgcaatattgcctacgataccgatgctgaaagtgcgggttttaaataaatctaaactaattaatgggtttggcgtgcgtcgtgcatggagaatatagagaagcagtaacccgatgctggtgacaattaccgtcaaggcaatccagctggcgacaatcttttccccgaatagctctattccgctactgaagagaacaaggctgaggccaaacagcaaaaagccagtgatatcgaatctgcgtcgtgcggtggtgaaattgggcatatgtttgcgcgcgtaaagaaggcccgcaatacctatggggatattgattaaaaatatccagtgccaggttgcccaggtgaccagcacgccgccaagaacggggcctaaaattggccccaccagacccggcatggcgacaaaattcaatactggaagaagttcattacgaggataagcgcgcagtaaggccagccgagcaacaggcatcatcattgcgccgcctatcccctgaataacccggaagacaaccagctgtggtaggctattagaaagtgcgcaggccagagaacccaatgtgaacagactcacggcaagggtaaaaatgcgacgcgtaccgaagcgatcggctagccatccgcttaccggaataagcatcgccaccgtcagcgtataactgatgatggcactttgcatcgcgagaggagaacgattaaggctatgagcgattgcgggtaaggcggtattaagaatagtggcatcaagtgcctgcatgaagaaggccatcgccgcgatccacggcaaacccgccatactgcgcttctttttatcgctcattcaatgtcctgttatcgggttatcacttatcaggactgcgtagcagcgcctgacaagctttaaatgccgcgtcgccatcgctttggataatcgcatcgacaatcgcctgatgcagatccagctttatcactgtgtcgctggtaatactcgtgaagtaagtgtgataaacgctatggaataggctggcgaaactggtcaaaaacggattggcgctcatttcatagatatgctcatgccaggccatatcgacttcgatccagcgttcacggcgaaagttctcttttaatgccgccatttcggccattaacgtattgagatgcgctttctgttccgcggtgccaaccgttgctgccagtaggcaggcttgcggctccagacagatacgcataaccagaaagtgatcgatgacctgatgaaagttctcttctgtcatccaccaggtaagcaattcctgatcaagaaaattccagttgctttgtggcatgacccgagtaccaattcgcggtcgcggtaaaaccatcccttttgccgttaacgttttgaccgcttcgcgtaccgctgtacgactcactccaaattgctcgcccagctcaatctcaccgggcaaaatggtgccgggttcatattcaccttttaagatccgttgcgccagcttctcagccagaacatagctaaggtttttctgtgcagctaactgttgtgcgcttaaaggcattacttatcttcctttttctttttattcctccttagtatgccaccaggaagtgtgattacggttgcaaaaacggcaaattgcttgttttatggcacattaacggggcttttgctgaaaaaatgcgcggtcagaaaattattttaaatttcctcttgtcaggccggaataactccctataatgcgccaccactgacacggaacaacggcaaacacgccgccgggtcagcggggttctcctgagaactccggcagagaaagcaaaaataaatgcttgactctgtagcgggaaggcgtattatgcacaccccgcgccgctgagaaaaagcgaagcggcactgctctttaacaatttatcagacaatctgtgtgggcactcgaagatacggattcttaacgtcgcaagacgaaaaatgaataccaagtctcaagagtgaacacgtaattcattacgaagtttaattctttgagcgtcaaacttttaaattgaagagtttgatcatggctcagattgaacgctggcggcaggcctaacacatgcaagtcgaacggtaacaggaagaagcttgcttctttgctgacgagtggcggacgggtgagtaatgtctgggaaactgcctgatggagggggataactactggaaacggtagctaataccgcataacgtcgcaagaccaaagagggggaccttcgggcctcttgccatcggatgtgcccagatgggattagctagtaggtggggtaacggctcacctaggcgacgatccctagctggtctgagaggatgaccagccacactggaactgagacacggtccagactcctacgggaggcagcagtggggaatattgcacaatgggcgcaagcctgatgcagccatgccgcgtgtatgaagaaggccttcgggttgtaaagtactttcagcggggaggaagggagtaaagttaatacctttgctcattgacgttacccgcagaagaagcaccggctaactccgtgccagcagccgcggtaatacggagggtgcaagcgttaatcggaattactgggcgtaaagcgcacgcaggcggtttgttaagtcagatgtgaaatccccgggctcaacctgggaactgcatctgatactggcaagcttgagtctcgtagaggggggtagaattccaggtgtagcggtgaaatgcgtagagatctggaggaataccggtggcgaaggcggccccctggacgaagactgacgctcaggtgcgaaagcgtggggagcaaacaggattagataccctggtagtccacgccgtaaacgatgtcgacttggaggttgtgcccttgaggcgtggcttccggagctaacgcgttaagtcgaccgcctggggagtacggccgcaaggttaaaactcaaatgaattgacgggggcccgcacaagcggtggagcatgtggtttaattcgatgcaacgcgaagaaccttacctggtcttgacatccacggaagttttcagagatgagaatgtgccttcgggaaccgtgagacaggtgctgcatggctgtcgtcagctcgtgttgtgaaatgttgggttaagtcccgcaacgagcgcaacccttatcctttgttgccagcggtccggccgggaactcaaaggagactgccagtgataaactggaggaaggtggggatgacgtcaagtcatcatggcccttacgaccagggctacacacgtgctacaatggcgcatacaaagagaagcgacctcgcgagagcaagcggacctcataaagtgcgtcgtagtccggattggagtctgcaactcgactccatgaagtcggaatcgctagtaatcgtggatcagaatgccacggtgaatacgttcccgggccttgtacacaccgcccgtcacaccatgggagtgggttgcaaaagaagtaggtagcttaaccttcgggagggcgcttaccactttgtgattcatgactggggtgaagtcgtaacaaggtaaccgtaggggaacctgcggttggatcacctccttaccttaaagaagcgtactttgtagtgctcacacagattgtctgatagaaagtgaaaagcaaggcgtttacgcgttgggagtgaggctgaagagaataaggccgttcgctttctattaatgaaagctcaccctacacgaaaatatcacgcaacgcgtgataagcaattttcgtgtccccttcgtctagaggcccaggacaccgccctttcacggcggtaacaggggttcgaatcccctaggggacgccacttgctggtttgtgagtgaaagtcgccgaccttaatatctcaaaactcatcttcgggtgatgtttgagatatttgctctttaaaaatctggatcaagctgaaaattgaaacactgaacaacgaaagttgttcgtgagtctctcaaattttcgcaacacgatgatgaatcgaaagaaacatcttcgggttgtgaggttaagcgactaagcgtacacggtggatgccctggcagtcagaggcgatgaaggacgtgctaatctgcgataagcgtcggtaaggtgatatgaaccgttataaccggcgatttccgaatggggaaacccagtgtgtttcgacacactatcattaactgaatccataggttaatgaggcgaaccgggggaactgaaacatctaagtaccccgaggaaaagaaatcaaccgagattcccccagtagcggcgagcgaacggggagcagcccagagcctgaatcagtatgtgtgttagtggaagcgtctggaaaggcgcgcgatacagggtgacagccccgtacacaaaaatgcacatattgtgagctcgatgagtagggcgggacacgtggtatcctgtctgaatatggggggaccatcctccaaggctaaatactcctgactgaccgatagtgaaccagtaccgtgagggaaaggcgaaaagaaccccggcgaggggagtgaaaaagaacctgaaaccgtgtacgtacaagcagtgggagcacgcttaggcgtgtgactgcgtaccttttgtataatgggtcagcgacttatattctgtagcaaggttaaccgaataggggagccgaagggaaaccgagtcttaactgggcgttaagttgcagggtatagacccgaaacccggtgatctagccatgggcaggttgaaggttgggtaacactaactggaggaccgaaccgactaatgttgaaaaattagcggatgacttgtggctgggggtgaaaggccaatcaaaccgggagatagctggttctccccgaaagctatttaggtagcgcctcgtgaattcatctccgggggtagagcactgtttcggcaagggggtcatcccgacttaccaacccgatgcaaactgcgaataccggagaatgttatcacgggagacacacggcgggtgctaacgtccgtcgtgaagagggaaacaacccagaccgccagctaaggtcccaaagtcatggttaagtgggaaacgatgtgggaaggcccagacagccaggatgttggcttagaagcagccatcatttaaagaaagcgtaatagctcactggtcgagtcggcctgcgcggaagatgtaacggggctaaaccatgcaccgaagctgcggcagcgacgcttatgcgttgttgggtaggggagcgttctgtaagcctgcgaaggtgtgctgtgaggcatgctggaggtatcagaagtgcgaatgctgacataagtaacgataaagcgggtgaaaagcccgctcgccggaagaccaagggttcctgtccaacgttaatcggggcagggtgagtcgacccctaaggcgaggccgaaaggcgtagtcgatgggaaacaggttaatattcctgtacttggtgttactgcgaaggggggacggagaaggctatgttggccgggcgacggttgtcccggtttaagcgtgtaggctggttttccaggcaaatccggaaaatcaaggctgaggcgtgatgacgaggcactacggtgctgaagcaacaaatgccctgcttccaggaaaagcctctaagcatcaggtaacatcaaatcgtaccccaaaccgacacaggtggtcaggtagagaataccaaggcgcttgagagaactcgggtgaaggaactaggcaaaatggtgccgtaacttcgggagaaggcacgctgatatgtaggtgaagcgacttgctcgtggagctgaaatcagtcgaagataccagctggctgcaactgtttattaaaaacacagcactgtgcaaacacgaaagtggacgtatacggtgtgacgcctgcccggtgccggaaggttaattgatggggtcagcgcaagcgaagctcttgatcgaagccccggtaaacggcggccgtaactataacggtcctaaggtagcgaaattccttgtcgggtaagttccgacctgcacgaatggcgtaatgatggccaggctgtctccacccgagactcagtgaaattgaactcgctgtgaagatgcagtgtacccgcggcaagacggaaagaccccgtgaacctttactatagcttgacactgaacattgagccttgatgtgtaggataggtgggaggctttgaagtgtggacgccagtctgcatggagccgaccttgaaataccaccctttaatgtttgatgttctaacgtggacccgtgatccgggttgcggacagtgtctggtgggtagtttgactggggcggtctcctcctaaagagtaacggaggagcacgaaggttggctaatcctggtcggacatcaggaggttagtgcaatggcataagccagcttgactgcgagcgtgacggcgcgagcaggtgcgaaagcaggtcatagtgatccggtggttctgaatggaagggccatcgctcaacggataaaaggtactccggggataacaggctgataccgcccaagagttcatatcgacggcggtgtttggcacctcgatgtcggctcatcacatcctggagctgaagtaggtcccaagggtatggctgttcgccatttaaagtggtacgcgagctgggtttagaacgtcgtgagacagttcggtccctatctgccgtgggcgctggagaactgaggggggctgctcctagtacgagaggaccggagtggacgcatcactggtgttcgggttgtcatgccaatggcactgcccggtagctaaatgcggaagagataagtgctgaaagcatctaagcacgaaacttgccccgagatgagttctccctgactccttgagagtcctgaaggaacgttgaagacgacgacgttgataggccgggtgtgtaagcgcagcgatgcgttgagctaaccggtactaatgaaccgtgaggcttaaccttacaacgccgaagctgttttggcggatgagagaagattttcagcctgatacagattaaatcagaacgcagaagcggtctgataaaacagaatttgcctggcggccgtagcgcggtggtcccacctgaccccatgccgaactcagaagtgaaacgccgtagcgccgatggtagtgtggggtctccccatgcgagagtagggaactgccaggcatcaaattaagcagtaagccggtcataaaaccggtggttgtaaaagaattcggtggagcggtagttcagtcggttagaatacctgcctgtcacgcagggggtcgcgggttcgagtcccgtccgttccgccaccctaattaggggcgtagttcaattggtagagcaccggtctccaaaaccgggtgttgggagttcgagtctctccgcccctgccagaaatcatccttagcgaaagctaaggattttttttatctgaaataaccctctccgaagtaaatccttctaccggcatccttgccagccattcatattaatacacttcatccagcacgttaattttcaaaagatcgcgaatcaacgcatttttatcgctattttgcagccatatggcataaagcggccgactaagtgttgtgctatcgacaacggtatgcaggccgccttttttacgcgcccagctgacgggtagccaggtgcaaccattaagcatcgcaatctgttgctgtgccagttcagcagaactggttgtcagaatgggcacttcgtcagcaccgatcaaacctgcctcatgctgttgaaaatctggcccccactcaagtcgcagataattaagatctccctttagtttactaggggcactggtataaagcgctaaagtgaaatatcccagcaactgactactaaattcgtccattttgggcgcttcagtggtaataagaagatcaagctggcgttcatgcagctgttttaccagagactgccgttgggcaattcgcgcttcgaactgtaagcctgtatgggcatcctgattttgatacaagcgtcccagccactgattaagcatacattcccacaagctggcgctggcaccgatagaaaactcgttatgtcgactggtatgcgccacctccttacgggcggcctgccaggtgctcatgagcgtttctgcataaggcagtagtttttcaccggcagcggttaaacggatattgtttctgtggcgggtgaaaaggttcacacccagttgattttccagttgtctgattcgaaagctcactgcactctgggtcagatagaggctttcagccgctcgaccaaagtgacgcgttcggctaacttccaggaaagtttttaacaattccgtatccacagtgctctccgcaaaattatttgtcgttatgatttaaatgttttgttttacactctgtcaagcgtaactaatactccgcgccataactagctcggtcaaagaattaggagcgtgcaggatggcggaaagctttacgacgactaatcgatatttcgacaataaacattatccacgtggattctctcgtcatggtgatttcaccatcaaagaggcacaactgcttgagcgtcatggttatgccttcaatgagttggatcttggcaaacgcgagccggttaccgaggaagagaaactcttcgtagcagtatgccgtggcgaacgtgagccagtgacagaagcagaacgcgtgtggtccaagtatatgacgcgtattaagcgtccaaaacgttttcacaccctttccggcggtaaaccgcaggttgaaggtgctgaagactacaccgattctgacgattaataaaaagggcgaaatgccctttttttatgtcagtagtttctgcagatggatgagcaaacggtcaatcgctcgatagctaactgcctcctgcaaatgctgacgtgtgataatgtcagactgatcaatatcagcaatggttcgtgcaactttcaataaccgctgccaggcacgaatgcttaaccccagatggatcagtgttccttccaaccacatcgcatcttcgctctcaagtttgcagaattggcgtatttccggactatccagccaggcattcagtttattctgccgcttaaattggcgctctctggcggccattacgcgttgtttaacggtggcgctgctttctcccggcactaccgttttactcaaaatgccggggggtggtaatgggatctccagactgagatcgaagcggtcgagaaagggcccgctgagccggttgagataacgtaatgtctgttctggcgtgcagcggttatggtttccctgataatgtccggtagggctgggattcatcgccgcaacaagctggaaacgggctggataggttatttttgctcgtgtgcgactaagatggatctgcccggattcaatcggctctcgcaaggcatccagtgtacgccgttcaaattcaggtagctcatcaagaaaaagcacgccgttatgcgccaggctaatttcaccgggccctggaattgcgccaccgcctaccatcgcagttaagcttgcactgtgatgaggactgcggaacgggcgctgccgccattgtttttgtacactttcagcatttaccagacttaatatcgcagcactctccagtgcctcttcattgcttaaatctggcaacaggccattaatacggctggcgagcattgttttacctgttcccggcggcccaatcagtaaaaggttgtgcccgccagcagcggtaatttccagtcctcgctttccttgttcctgaccgataacatcactgagatcatgttgtagcgcccgggatactgcatcagttggtttcgggcgttcgagagcgtgcttaccttccagaaacgcacagacagcttgcagatgatcggctatcaggcatccttcaccgttaattagccccacttcatcttcgttatctttcgcgacgataatttttctgccgctcttaatagcttcagttgcactggagattgcgccgggaacgccacgcagagcgcctgtaagcgccagttctccgactaattcatattcatctaacttattggctgtaagctgttcactggccgccagcaacgcaatggcgataggtaaatcatatcgtcccccttcttttggcagatcagctggagccaggttgatggtgatttttttcgccggatattcatatccgctattgataatggcgctgcgcacgcgatcgcgagcttcttttaccgttgtttctggtaagcccaccatcgttaagccgggtagacctttactgatatgtacctcaacagtgatcgggggcgcatttactcccagggctgcgcgggtatgaacaatactcagactcataagccctccttgagtcaccattatgtgcataagatatcgctgctgtagcccgctaattcgtgaattttagtggctgattcctgtttatttgtgcaagtgaagttgagttgttctggcggtggaatgatgctcgcaaaaatgcagcggacaaaggatgaactacgaggaagggaacaacattcatactgaaattgaatttttttcactcactattttatttttaaaaaacaacaatttatattgaaattattaaacgcatcataaaaatcggccaaaaaatatcttgtactatttacaaaacctatggtaactctttaggcattccttcgaacaagatgcaagaaaagacaaaatgacagcccttctacgagtgattagcctggtcgtgattagcgtggtggtgattattatcccaccgtgcggggctgcacttggacgaggaaaggcttaaagatcaagccttaacgaactaagacccccgcaccgaaaggtccgggggttttttttgaccttaaaaacataaccgaggagcagacaatgaataacagcacaaaattctgtttctcaagattcaggacggggaactaactatgaatggcgcacagtgggtggtacatgcgttgcgggcacagggtgtgaacaccgttttcggttatccgggtggcgcaattatgccggtttacgatgcattgtatgacggcggcgtggagcacttgctatgccgacatgagcagggtgcggcaatggcggctatcggttatgctcgtgctaccggcaaaactggcgtatgtatcgccacgtctggtccgggcgcaaccaacctgataaccgggcttgcggacgcactgttagattccatccctgttgttgccatcaccggtcaagtgtccgcaccgtttatcggcactgacgcatttcaggaagtggatgtcctgggattgtcgttagcctgtaccaagcacagctttctggtgcagtcgctggaagagttgccgcgcatcatggctgaagcattcgacgttgcctgctcaggtcgtcctggtccggttctggtcgatatcccaaaagatatccagttagccagcggtgacctggaaccgtggttcaccaccgttgaaaacgaagtgactttcccacatgccgaagttgagcaagcgcgccagatgctggcaaaagcgcaaaaaccgatgctgtacgttggcggtggcgtgggtatggcgcaggcagttccggctttgcgtgaatttctcgctgccacaaaaatgcctgccacctgtacgctgaaagggctgggcgcagtagaagcagattatccgtactatctgggcatgctggggatgcacggcaccaaagcggcaaacttcgcggtgcaggagtgtgacctgctgatcgccgtgggcgcacgttttgatgaccgggtgaccggcaaactgaacaccttcgcgccacacgccagtgttatccatatggatatcgacccggcagaaatgaacaagctgcgtcaggcacatgtggcattacaaggtgatttaaatgctctgttaccagcattacagcagccgttaaatcaatgactggcagcaacactgcgcgcagctgcgtgatgaacattcctggcgttacgaccatcccggtgacgctatctacgcgccgttgttgttaaaacaactgtcggatcgtaaacctgcggattgcgtcgtgaccacagatgtggggcagcaccagatgtgggctgcgcagcacatcgcccacactcgcccggaaaatttcatcacctccagcggtttaggtaccatgggttttggtttaccggcggcggttggcgcacaagtcgcgcgaccgaacgataccgttgtctgtatctccggtgacggctctttcatgatgaatgtgcaagagctgggcaccgtaaaacgcaagcagttaccgttgaaaatcgtcttactcgataaccaacggttagggatggttcgacaatggcagcaactgttttttcaggaacgatacagcgaaaccacccttactgataaccccgatttcctcatgttagccagcgccttcggcatccatggccaacacatcacccggaaagaccaggttgaagcggcactcgacaccatgctgaacagtgatgggccatacctgcttcatgtctcaatcgacgaacttgagaacgtctggccgctggtgccgcctggcgccagtaattcagaaatgttggagaaattatcatgatgcaacatcaggtcaatgtaagcgctcgcttcaatccagaaaccttagaacgtgttttacgcgtggtgcgtcatcgtggtttccacgtctgcagtatgaatatggccgccgccagcgatgcacaaaatataaatatcgaattgaccgttgccagcccacggagcgtcgacttactgtttagtcagttaaataaactggtggacgtcgcacacgttgccatctgccagagcacaaccacaagtcaacaaatccgcgcctgagcgcaaaaggaatataaaaatgaccacgaagaaagctgattacatttggttcaatggggagatggttcgctgggaagacgcgaaggtgcatgtgatgagccacgcgctgcactatggcactagcgtttttgaaggcatccgttgctacgacagccacaaaggaccggttgtattccgccatcgtgagcatatgcagcgtctgcatgactccgccaaaatctatcgcttcccggttagccagagcattgatgagctgatggaagcttgtcgtgacgtgatccgcaaaaacaatctcaccagcgcctatatccgtccgctgatcttcgtcggtgatgttggcatgggagtaaacccgccagcgggatacagtaccgacgtgattatcgctgctttcccgtggggagcgtatctgggcgcagaagcgctggagcaggggatcgatgcgatggtttcctcctggaaccgcgcagcaccaaacaccatcccgacggcggcaaaagccggtggtaactacctctcttccctgctggtgggtagcgaagcgcgccgccacggttatcaggaaggtatcgcgctggatgtgaacggttatatctctgaaggcgcaggcgaaaacctgtttgaagtgaaagatggtgtgctgttcaccccaccgttcacctcctccgcgctgccgggtattacccgtgatgccatcatcaaactggcgaaagagctgggaattgaagtacgtgagcaggtgctgagccgcgaatccctgtacctggcggatgaagtgtttatgtccggtacggcggcagaaatcacgccagtgcgcagcgtagacggtattcaggttggcgaaggccgttgtggcccggttaccaaacgcattcagcaagccttcttcggcctcttcactggcgaaaccgaagataaatggggctggttagatcaagttaatcaataaatacaaaaaatgggacggcacgcaccgtcccatttacgagacagacactgggagtaaataaagtatgcctaagtaccgttccgccaccaccactcatggtcgtaatatggcgggtgctcgtgcgctgtggcgcgccaccggaatgaccgacgccgatttcggtaagccgattatcgcggttgtgaacagcttcacccaatttgtaccgggtcacgtccatctgcgcgatctcggtaaactggtcgccgaacaaattgaagcggctggcggcgttgccaaagagttcaacaccattgcggtggatgatgggattgccatgggccacggggggatgctttatagtctgccatctcgcgaactgatcgctgattccgttgagtatatggtcaacgcccactgcgccgacgccatggtctgcatctctaactgcgacaaaatcaccccggggatgctgatggcttccctgcgcctgaatattccggtgatctttgtttccggcggcccgatggaggccgggaaaaccaaactttccgatcagatcatcaagctcgatctggttgatgcgatgatccagggcgcagacccgaaagtatctgactcccagagcgatcaggttgaacgttccgcgtgtccgacctgcggttcctgctccgggatgtttaccgctaacagtatgaactgcctgaccgaagcgctgggcctgagccagccgggcaacggcagcctgctggcaacccacgccgaccgtaagcagctgttccttaatgctggtaaacgcattgttgaattgaccaaacgttattacgagcaaaacgacgaaagtgcactgccgcgtaatatcgccagtaaggcggcgtttgaaaacgccatgacgctggatatcgcgatgggtggaagcactaacaccgtacttcacctgctggcggcggcgcaggaagcggaaatcgacttcaccatgagtgatatcgataagctttcccgcaaggttccacagctgtgtaaagttgcgccgagcacccagaaataccatatggaagatgttcaccgtgctggtggtgttatcggtattctcggcgaactggatcgcgcggggttactgaaccgtgatgtgaaaaacgtacttggcctgacgttgccgcaaacgctggaacaatacgacgttatgctgacccaggatgacgcggtaaaaaatatgttccgcgcaggtcctgcaggcattcgtaccacacaggcattcagccaagattgccgttgggatacgctggacgacgatcgcgccaatggctgtatccgcagcctggaacacgcctacagcaaagacggcggcctggcggtgctctacggtaactttgcggaaaacggctgcatcgtgaaaacggcaggcgtcgatgacagcatcctcaaattcaccggcccggcgaaagtgtacgaaagccaggacgatgcggtagaagcgattctcggcggtaaagttgtcgccggagatgtggtagtaattcgctatgaaggcccgaaaggcggtccggggatgcaggaaatgctctacccaaccagcttcctgaaaagtatgggtctcggcaaagcctgtgcgctgatcaccgacggtcgtttctctggtggcacctctggtctttccatcggccacgtcagtccggaagcggcaagcggcggcagcattggcctgattgaagatggtgacctgatcgctatcgacatcccgaaccgtggcattcagttacaggtaagcgatgccgaactggcggcgcgtcgtgaagcgcaggacgctcgaggtgacaaagcctggacgccgaaaaatcgtgaacgtcaggtctcctttgccctgcgtgcttatgccagcctggcaaccagcgccgacaaaggcgcggtgcgcgataaaagcaaactggggggttaataatggctgacagccaacccctgtccggtgctccggaaggtgccgaatatttaagagcagtgctgcgcgcgccggtttacgaggcggcgcaggttacgccgctacaaaaaatggaaaaactgagcagccgtcttgataacgtcattctggtgaagcgcgaagatcgccagccagtgcacagctttaagctgcgcggcgcatacgccatgatggcgggcctgacggaagaacagaaagcgcacggcgtgatcactgcttctgcgggtaaccacgcgcagggcgtcgcgttttcttctgcgcggttaggcgtgaaggccctgatcgttatgccaaccgccaccgccgacatcaaagtcgacgcggtgcgcggcttcggcggcgaagtgctgctccacggcgcgaactttgatgaagcgaaagccaaagcgatcgaactgagtcagcagcaggggttcacctgggtgccgccgttcgaccatccgatggtgattgccgggcaaggcacgctggcgctggaactgctccagcaggacgcccatctcgaccgcgtatttgtgccagtcggcggcggcggtctggctgctggcgtggcggtgctgatcaaacaactgatgccgcaaatcaaagtgatcgccgtagaagcggaagactccgcctgcctgaaagcagcgctggatgcgggtcatccggttgatctgccgcgcgtagggctatttgctgaaggcgtagcggtaaaacgcatcggtgacgaaaccttccgtttatgccaggagtatctcgacgacatcatcaccgtcgatagcgatgcgatctgtgcggcgatgaaggatttattcgaagatgtgcgcgcggtggcggaaccctctggcgcgctggcgctggcgggaatgaaaaaatatatcgccctgcacaacattcgcggcgaacggctggcgcatattctttccggtgccaacgtgaacttccacggcctgcgctacgtcagtgaacgctgcgaactgggcgaacagcgtgaagcgttgttggcggtgaccattccggaagaaaaaggcagcttcctcaaattctgccaactgcttggcgggcgtagcgtcaccgagttcaactaccgttttgccgatgccaaaaacgcctgcatctttgtcggtgtgcgcctgagccgcggcctcgaagagcgcaaagaaattttgcagatgctcaacgacggcggctacagcgtggttgatctctccgacgacgaaatggcgaagctacacgtgcgctatatggtcggcggacgtccaagccatccgttgcaggaacgcctctacagcttcgaattcccggaaagtccgggcgcgctgctgcgcttcctcaacacgctgggtacgtactggaacatttctttgttccactatcgcagccatggcaccgactacgggcgcgtactggcggcgttcgaacttggcgaccatgaaccggatttcgaaacccggctgaatgagctgggctacgattgccacgacgaaaccaataacccggcgttcaggttctttttggcgggttaaggaaaaatgcctgatagcgcttcgcttatcaggcctacccgcgcgacaacgtcatttgtggttcggcaaaatcttccagaatgcctcaattagcggctcatgtagccgctttttctgcgcacacacgcccagctcaaacggcgttttctcatcgctgcgctctaaaatcatcacgcggttacgcaccggttcggggctgttttccagcaccacttccggcaacaatgccacgccacagccgagtgccaccatgcttaccatcgcttcatgcccgccaaccgtggcgtaaatcatcgggttactgattttattgcgtcgaaaccacagttcaatgcggcggcgtaccggcccctgatcggccataataaacggcaccgtactccagtccggcttctctacgctcacctgattacgcaccgggcagggcagcgcgggggcaatcagcactactgccagattctccagcatgctaaacgccactgcgccgggcaaggtttccggtttacccgcaatcgccagatccgcttcaccagtgaccaccttttccatcgcatctgccgcatcaccagtagtaagtttaatctccacgctcgggtgttccgcgcggaagcgatccagaatcggcggcagatggctgtaggcagcggtcacgctgcagaagatatgtaattcgccagagaggctcggcccttgctgatcgatggtgtggcgcaactgctgatactgcaacagcgtttgctgggcgaaaacgcgcagctcttcgcccgcttcagtcagcgtcaccgtgcggttatcgcgcacaaacagcggctgaccgagatcttcttccaggcgctgaatctgccgactgagcgtggatgggctaacgtgcatcgcccgcgcgctgcggccaaaatggcggctttccgccagatgcaggaaggttttcagatcgcgtaaatccacagggacagccctcgatgttgacgttgcaaaaattgcaatgtgacgttgtgaatatatcaatttccgcaataaatttcctgtcatatagtgaattcaatctcgcaaacgcgaaccgaacaataagaagcacaacatcacgaggaatcaccatggctaactacttcaatacactgaatctgcgccagcagctggcacagctgggcaaatgtcgctttatgggccgcgatgaattcgccgatggcgcgagctaccttcagggtaaaaaagtagtcatcgtcggctgtggcgcacagggtctgaaccagggcctgaacatgcgtgattctggtctcgatatctcctacgctctgcgtaaagaagcgattgccgagaagcgcgcgtcctggcgtaaagcgaccgaaaatggttttaaagtgggtacttacgaagaactgatcccacaggcggatctggtgattaacctgacgccggacaagcagcactctgatgtagtgcgcaccgtacagccactgatgaaagacggcgcggcgctgggctacagccacggtttcaacatcgtcgaagtgggcgagcagatccgtaaagatatcaccgtagtgatggttgcgccgaaatgcccaggcaccgaagtgcgtgaagagtacaaacgtgggttcggcgtaccgacgctgattgccgttcacccggaaaacgatccgaaaggcgaaggcatggcgattgccaaagcctgggcggctgcaaccggtggtcaccgtgcgggtgtgctggaaagctccttcgttgcggaagtgaaatctgacctgatgggcgagcaaaccatcctgtgcggtatgttgcaggctggctctctgctgtgcttcgacaagctggtggaagaaggtaccgatccagcatacgcagaaaaactgattcagttcggttgggaaaccatcaccgaagcactgaaacagggcggcatcaccctgatgatggaccgtctctctaacccggcgaaactgcgtgcttatgcgctttctgaacagctgaaagagatcatggcacccctgttccagaaacatatggacgacatcatctccggcgaattctcttccggtatgatggcggactgggccaacgatgataagaaactgctgacctggcgtgaagagaccggcaaaaccgcgtttgaaaccgcgccgcagtatgaaggcaaaatcggcgagcaggagtacttcgataaaggcgtactgatgattgcgatggtgaaagcgggcgttgaactggcgttcgaaaccatggtcgattccggcatcattgaagagtctgcatattatgaaagtctgcacgagctgccgctgattgccaacaccatcgcccgtaagcgtctgtacgaaatgaacgtggttatctctgataccgctgagtacggtaactatctgttctcttacgcttgtgtgccgttgctgaaaccgtttatggcagagctgcaaccgggcgacctgggtaaagctattccggaaggcgcggtagataacgggcaactgcgtgatgtgaacgaagcgattcgcagccatgcgattgagcaggtaggtaagaaactgcgcggctatatgacagatatgaaacgtattgctgttgcgggttaagtgcgcgctgatgccctcaccccgaccctctcccacagggagagggagaaaacactcaaggccttctcctggagaaggccttgctattagttgcggtacagcaccttaatgatgtgatatccgaactgggtgtgcagcgggccggtcggctccagtaccggacaagagaaaaccactttatcgaacgccggaaccatctgaccctggcggaattcacctaaatcaccgccgcgtttgccacttgggcaaatggagtgtttcttcgccagcttgccgaaatcggccccgttcttaatctgctcgagaagatccagagccagtttctcttcttttacaaggatatgcagtgctgctgctgtttttgccatgatcgtgccttgagtgaataattgtcaggcggcgattttagcatgatccgcagatgctaacgtaattgtcagtcagggagtggctggtacatatatggcaaaagcccggaaaatccgggcttcgcaggtccctcaaggggagaaaacttagggcctctatgggctacaaagtcattatcggggatggttattttattgtcaatttatgaggcttatggcattgatactcttgatgaccgccctctgtatgtctgcaaccaactcatgtggcaaacattgattaagataccctctgtaagtccttgctctgtttaatctgtttcgactgacttgttgtaccaggtcggctttggcccaacgaatctgctgatcaaagaattgcaggtcattgataacattactggctatttcaacatgcattccacgttttaacttgtctggtcggctgtggttgataatggaacgacgatgcatgcgttgccattaatttttccgttgagcacgacaactaacctgttttttatcatttcaggaggaatgcggccatcgtaatacgtcgtgctgaacggtccattttggctaacaggatagttaccaaagttgcattccagtatttcaccaaccttagggctgaaattaatcgccacgagtaaacctctccttagtaaactctgaaaaagtaataacacaacgttacgacccgatattttctaagtctaatggattcacgatgaactccgatttcggtcttctctctctgatttaaacatccgcagccaaccggttagcggcttacacgcggtcacattcaaatgcgattctgctacaatcctccccccgttcgaagattgagcaatacacctatgcgtctaaaccccggccaacaacaagctgtcgaattcgttaccggcccctgcctggtgctggcgggcgcgggttccggtaaaactcgtgttatcaccaataaaatcgcccatctgatccgcggttgcggttatcaggcgcggcacattgcggcggtgacctttactaataaagcagcgcgcgagatgaaagagcgtgtagggcagacgctggggcgcaaagaggcgcgtgggctgatgatctccactttccatacgttggggctggatatcatcaaacgcgagtatgcggcgcttgggatgaaagcgaacttcagcttgtttgacgataccgatcagcttgctttgcttaaagagttgaccgaggggctgattgaagatgacaaagttctcctgcaacaactgattagcaccatctctaactggaagaatgatctcaaaacaccgtcccaggcggcagcaagtgcgattggcgagcgggaccgtatttttgcccattgttatgggctgtatgatgcacacctgaaagcctgtaacgttctcgacttcgatgatctgattttattgccgacgttgctgctgcaacgcaatgaagaagtccgcaagcgctggcagaacaaaattcgctatctgctggtggatgagtatcaggacaccaacaccagccagtatgagctggtgaaactgctggtgggcagccgcgcgcgctttaccgtggtgggtgacgatgaccagagcatctactcctggcgcggtgcacgtccgcaaaacctggtgctgctgagtcaggattttccggcgctgaaggtgattaagcttgagcagaactatcgctcttccgggcgtattctgaaagcggcgaacatcctgatcgccaataacccgcacgtctttgaaaagcgtctgttctccgaactgggttatggcgcggagctaaaagtattaagcgcgaataacgaagaacatgaggctgagcgcgttactggcgagctgatcgcccatcacttcgtcaataaaacgcagtacaaagattacgccattctttatcgcggtaaccatcagagccgggtgtttgaaaaattcctgatgcaaaaccgcatcccgtacaaaatatctggtggtacgagctttttctctcgtcctgaaatcaaggacttgctggcttatctgcgcgtgctgactaacccggacgatgacagcgcatttctgcgtatcgttaacacgccgaagcgagagattggcccggctacgctgaaaaagctgggtgagtgggcgatgacgcgcaataaaagcatgtttaccgccagctttgatatgggcctgagtcagacgcttagcggacgtggttatgaagcattgacccgcttcactcactggttggcagaaatccagcgtctggcggagcgggagccgattgccgcggtgcgtgatctgatccatggcatggattatgaatcctggctgtacgaaacaagccccagcccgaaagccgccgaaatgcgcatgaagaacgtcaaccaactgtttagctggatgacggagatgctggaaggcagtgaactggatgagccgatgacgctcacccaggtggtgacgcgctttactttgcgcgacatgatggagcgtggtgagagtgaagaagagctggatcaggtgcaactgatgactctccacgcgagcaaagggctggagtttccttatgtctacatggtcggtatggaagaagggtttttgccgcaccagagcagcatcgatgaagataatatcgatgaggagcggcggctggcctatgtcggcattacccgcgcccagaaggaattgacctttacgctgtgtaaagaacgccgtcagtacggcgaactggtgcgcccggagccgagccgctttttgctggagctgccgcaggatgatctgatttgggaacaggagcgcaaagtggtcagcgccgaagaacggatgcagaaagggcaaagccatctggcgaatctgaaagcgatgatggcggcaaaacgagggaaataatcaaggccggaaaagatgcgtcagcatcgcatccggcacttactcattaatgcacttccagcggccagtggacatagctctgccactggctttcctgagcaataatctctttacccagcggatgttgggttagccaaccttgcggaagcgtcaaggtcaacagttcatggttagcctgtaatgtcatctctggcacgagatcgtcacggcgacggctggcaaaaatgatggccaggcgtagtaaacggcagagttgttctgcgacgcgcggcggtacggcattttgctgatgcaggctactgagatcgaccggattagtctggttgagcagtagcgtcgccagcaattttttctgtgcgggggtaaaaccgggaagatccagattacgcaccagataagcagcgtgttgcggcgcttgtttgaagtcaacgctcaggccgatttcatgaagctgacaggcgctgatgagcaaatcgcggcttattgcttcaagatgccattcgttttccacctgatcgaagaagttagccgcaactttggctacgcgctgtgcctgatcaatatcgatcataaagcggcgttgaatattacgcagcgtacggctgcgaatatcctgctcgacggccagatgcaacatgccgtagaccaggccttcacgcagcgcaccgcccgccagggtcatacactgaatattcagttcggtaaaaatggcgatcaggatcgccagaccactcgggaacactaacgcacgttccagcgtcagcccgtcaatctccagttcctccagccgaccgcaatgaatggctcgctgtttcaattgctgcaacttttccagggtaatgcgttcatccatcccctgtgccatcatgatttcctgtaacgcctgcacggtgccggaagcaccaacgcacactttccagccgtgataccgtaattcatcggcaaccggacgtaacacttcgcgtgccgctttttctgcagcatcaaaattttcctgccccagattacgatcggcaaaatagcgttccagccaggtgacgcagcccatgctcaggctgaacaagctggtggtttgtgcacccgtgccggttaccagttcagtactggctccgcctatatccaccaccaggcgctgatcggcaccaccagtggtgtgagcaacgccctgataaatcagacgtgcttcctcttcaccgctgatcacctgtaccggacaaccgagaatttcctgcgctttggcaataaaatcacccgcattgacggcaaggcgtaacgtcgccgtagcgacaacgcgaatttggctgggaggaatatcttgcagacgttcagcaaacaggcgcaaacattgccaaccgcgctccattgcttcattggagagggcattttcgctattcaggccagcagccagacgcactttgcgttttattcgcgtcagcgtctggatgcttccagccacctcgcgcacaaccagcatatgaaaactattgctaccgagatcaatggctgcatacaggctgctggtggaacccatactcttcatccttcaatctgtctctgtgttggctgcattctttcacctgaatcacttactacagtaagctcatcgggattcattctcttgccatcttgatacagtttgaatgattttgagtatgacattttttatttaaccactacgacgacgattacgcggagcgccagtacgacgcggaccattgcctgtgcgcgggcgcgtgaggcgcagcggttttggcagatcggtcatcaatgcgtccggattgtatttgcttaccggaatactgtgaccaatataggtctcaatagcaggcaaattcaatgcatactcttcacacgccaggctgatagagtgaccgcttgcgcctgcgcgacctgtacgaccaatacggtgaacgtaatcttcacagtcatcgggtaaatcgtagttaaagacgtgcgtcactgccggaatatgcaaaccacgcgcggcaacgtcggtggcaaccagaatatccagatcgccacgggtaaattcatcaagaatacgcagacgttttttctgcgcgacatcgcctgtcaataaaccgacacgatgaccatctgctgccaggtggccccagatctcttcacaacggtgtttggtgttggcgaaaataatcgctctgtctggccactcttcttcgatcagcgtttgcagcaaacgcattttttcttcgttagaagggtagaaaagctcttctttaatacggtggcccgttttctgttccggttccacttcaatatattcggcattgttcatctgctcgaacgccagttcacgtacccggtagctaagcgtggcggagaacagcatgttgaggcgctggtttgcaggcggcatacggcggaacagccagcggatatctttaataaagcccagatcgtacatgcgatcggcttcgtccagtaccaccacctgaatggcaccgaggttaatgtggttctgcttggcgtagtcaattaaacgccccgtggtgccaatcagaatgtcaacgccgctttccagcactttcagctgtttgtcgtagccatcaccaccgtaagccagacccagcttcaggccagtagcttccgccagcggttctgcgtcggcatggatctgcacggcaagttcacgcgtcggtgccataattaaggcacgcggctgattcaccttgcgatcggcaatcgcaggatgagagagaagataatgaaacgtactcgtaagaaacgccatcgttttcccggtaccggtttgcgcctgcccggctacgtcacgacccgccagcgtcagcggaagggccagtgcctgaatgggcgtacagttatgaaacccttttttttcaagggcttctacaaccttcggatgcagggcgaagtcggaaaacttctgttctgttaaatgtgttttgctcatagtgtggtagaatatcagcttactattgctttacgaaagcgtatccggtgaaataaagtcaacctttagttggttaatgttacaccaacaacgaaaccaacacgccaggcttattcctgtggagttatatatgagcgataaaattattcacctgactgacgacagttttgacacggatgtactcaaagcggacggggcgatcctcgtcgatttctgggcagagtggtgcggtccgtgcaaaatgatcgccccgattctggatgaaatcgctgacgaatatcagggcaaactgaccgttgcaaaactgaacatcgatcaaaaccctggcactgcgccgaaatatggcatccgtggtatcccgactctgctgctgttcaaaaacggtgaagtggcggcaaccaaagtgggtgcactgtctaaaggtcagttgaaagagttcctcgacgctaacctggcgtaagggaatttcatgttcgggtgccccgtcgctaaaaactggacgcccggcgtgagtcatgctaacttagtgttgacttcgtattaaacataccttattaagtttgaatcttgtaatttccaacgcttcccgttttatcttaaatgcgaagtgaacagatttctggcagcagtctcaatccgtcttgtcgtttcagttctgcgtactctcctgtgaccaggcagcgaaaagacatgagtcgatgaccgtaaacaggcatggatgatcctgccataccattcacaacattaagttcgagatttaccccaagtttaagaactcacaccactatgaatcttaccgaattaaagaatacgccggtttctgagctgatcactctcggcgaaaatatggggctggaaaacctggctcgtatgcgtaagcaggacattatttttgccatcctgaagcagcacgcaaagagtggcgaagatatctttggtgatggcgtactggagatattgcaggatggatttggtttcctccgttccgcagacagctcctacctcgccggtcctgatgacatctacgtttcccctagccaaatccgccgtttcaacctccgcactggtgataccatctctggtaagattcgcccgccgaaagaaggtgaacgctattttgcgctgctgaaagttaacgaagttaacttcgacaaacctgaaaacgcccgcaacaaaatcctctttgagaacttaaccccgctgcacgcaaactctcgtctgcgtatggaacgtggtaacggttctactgaagatttaactgctcgcgtactggatctggcaagtcctatcggtcgtggtcagcgtggtctgattgtggcaccgccgaaagccggtaaaaccatgctgctgcagaacattgctcagagcattgcttacaaccacccggattgtgtgctgatggttctgctgatcgacgaacgtccggaagaagtaaccgagatgcagcgtctggtaaaaggtgaagttgttgcttctacctttgacgaacccgcatctcgccacgttcaggttgcggaaatggtgatcgagaaggccaaacgcctggttgagcacaagaaagacgttatcattctgctcgactccatcactcgtctggcgcgcgcttacaacaccgttgttccggcgagtggtaaagtgttgaccggtggtgtggatgccaacgccctgcatcgtccgaaacgcttctttggtgcggcgcgtaacgtggaagagggcggcagcctgaccattatcgcgacggcgcttatcgataccggttctaaaatggacgaagttatctacgaagagtttaaaggtacaggcaacatggaactgcacctctctcgtaagatcgctgaaaaacgcgtcttcccggctatcgactacaaccgttctggtacccgtaaagaagagctgctcacgactcaggaagaactgcagaaaatgtggatcctgcgcaaaatcattcacccgatgggcgaaatcgatgcaatggaattcctcattaataaactggcaatgaccaagaccaatgacgatttcttcgaaatgatgaaacgcagttaaatttgtcttatgccaaaaacgccacgtgtttacgtggcgttttgcttttatatctgtaatcttaatgccgcgctggcgatgttaggaaaattcctggaatttgctggcatgttatgcaatttgcatatcaaatggttaatttttgcacaggactggtgggtttggaacggactttcccttctgaataaaggtcttcgtggttatacttctgctaataattttctctgagagcatgcattgtgaatttactgacagtgagtactgatctcatcagtatttttttattcacgacactgtttctgttttttgcccgtaaggtggcaaaaaaagtcggtttagtggataaaccaaacttccgcaaacgtcaccagggattgatacctctcgttggggggattagcgtttacgcagggatttgcttcacgttcggaattgtcgattactatattccgcatgcatctctctatctcgcttgtgccggtgtgcttgttttcattggcgcgctggatgaccgttttgatatcagcgtaaaaatccgtgccaccatacaggccgctgttggcattgttatgatggtgttcggcaagctttatctcagtagcctgggttatatctttggctcctgggagatggtgctcggaccgtttggttacttcctgacgctatttgccgtctgggcggccattaatgcgttcaacatggttgatggcattgatggcttgctgggcgggttgtcctgcgtcagctttgcagcaatcggtatgattttgtggttcgacgggcaaaccagcctcgcaatctggtgctttgcgatgatcgccgccatcctgccatacatcatgcttaaccttggtatcctgggtcgccgctacaaagtctttatgggtgatgcgggcagtacgctgattggttttaccgttatctggatcctgctcgaaacgacccagggcaaaacccatcccatcagcccggttaccgctttgtggataatcgccattccgctaatggatatggtggcgattatgtaccgtcgcctgcgtaaaggcatgagcccattctctcctgaccgtcagcatattcaccatttgatcatgcgtgccgggtttacttcccgtcaggcgtttgtgctgattacccttgccgcagcactgctcgcttccattggcgtgctggcagaatattctcattttgtcccggagtgggtcatgctggtgctctttttgctagcattcttcctctatggatattgcattaagcgtgcctggaaagttgctcgctttattaagcgcgtaaaacgcagactgcgtagaaatcgtggtggcagccccaatttaaccaaataaatgaggatgtgatgacacaaccaatgcctgggaaaccggccgaagacgctgaaaatgaactggatattcgtgggttgtttcgtaccttgtgggctgggaagctatggattattggcatggggctggcgtttgcgttaatcgcgctggcgtatacgttttttgctcgtcaggagtggagcagcacggcgattaccgatcgtccaacggtgaatatgctggggggatattacagccagcagcaatttttgcgtaacctggatgtccgtagtaacatggcttctgccgaccaaccaagcgtcatggacgaagcctataaagagtttgttatgcaactggccagctgggatacccgcagagagttctggctgcaaaccgactattacaaacagcggatggtgggcaacagcaaagccgatgcggcgttgctggatgaaatgattaacaacatccagtttatccccggagactttacccgcgcggtcaatgacagcgtgaagcttattgccgaaaccgcgcctgacgctaataacctgttacgtcagtatgttgcttttgccagccagcgtgcagccagccatctgaatgatgagctgaaaggcgcatgggcggcgcgtaccatccagatgaaagctcaggtgaagcgtcaggaagaggtggcgaaagccatctacgaccgccggatgaacagcattgagcaggcgctgaaaattgctgagcagcataatattagccgcagtgcgacagatgtacctgccgaggaattacctgatagtgaaatgttcctgcttgggcgtccaatgcttcaggctcgactggaaaatttacaggccgtcggtccggcctttgatctcgactatgatcagaatcgggccatgttaaacaccctgaatgttggtccaaccctggatccgcgttttcagacctatcgctatttgcgtacgccggaagaaccggtaaaacgcgatagcccacgtcgtgccttcctgatgattatgtggggcattgtcggggggctgatcggggctggtgtcgcattaacccgccgttgcagcaaataacaacactgctgcggtgagcgcaaaggcgctcgccgcttattcgaagagaatcgatgtgaaagtactgactgtatttggtacgcgcccggaagccatcaagatggcgccgttggtgcatgcgttggcaaaagatcctttttttgaggctaaagtttgcgtcactgcgcagcatcgggagatgctcgatcaggtgctgaaactcttttccattgtacctgactacgatctcaacataatgcagccaggacagggcctgacagagataacctgtcggattctggaagggctaaaacctattcttgccgagttcaaaccagacgtcgtgctggttcacggcgatacgacgacgacgctggcaaccagcctggcggcgttttatcagcgtattcctgttggtcacgttgaggctggtctgcgcacgggcgatctctatagcccgtggccggaagaggctaaccgtacattgaccgggcatctggcgatgtatcacttctctccaaccgaaacttcccggcaaaacttgctgcgtgaaaacgttgcggatagccgaatcttcattaccggtaatacagtcattgatgcactgttatgggtgcgtgaccaggtgatgagcagcgacaagctgcgtagtgaactggcggcaaattacccgtttatcgaccccgataaaaagatgattctggtgaccggtcacaggcgtgagagtttcggtcgtggctttgaagaaatctgccacgcgctggcagacatcgccaccacgcaccaggacatccagattgtctatccggtgcatctcaacccgaacgtcagagaaccggtcaatcgcattctggggcatgtgaaaaatgtcattctgatcgatccccaggagtatttaccgtttgtctggctgatgaaccacgcctggctgattttgaccgacagtggcggcattcaggaagaagcgcctagcctggggaaacctgtgctggtgatgcgcgataccactgagcgtccggaagcggtgacggcgggtacggtgcgtctggtaggcacggataagcagcgaattgtcgaggaagtgacgcgtcttttaaaagacgaaaacgaatatcaagctatgagccgcgcccataacccgtatggtgatggtcaggcatgctctcgcattctggaagcgttaaaaaataatcggataagtctatgagttttgcgaccatttctgttatcggactgggttatatcgggctgccaacggcagcagcgtttgccagtcggcaaaaacaggtaattggtgtcgatatcaaccaacatgcggttgataccatcaatcgtggcgaaatccatatcgtcgaacctgatttggcgagtgtagtaaaaactgccgtagaaggcggttttttacgagcgagcacgacgccagttgaagcggatgcctggctgattgctgtacccacgccgtttaagggcgatcatgagccagatatgacctacgttgaaagcgctgctcgctccattgcgccagtgctgaaaaaaggcgcgctggtgatccttgaatccaccagcccggtggggagtaccgagaagatggcagaatggttagcagagatgcgtccggatctcactttcccgcagcaggtgggcgagcaggcggacgtcaacattgcttactgcccggaacgcgtgttaccaggacaggtaatggtcgagctgattaaaaacgatcgcgtgattggtggtatgacgccggtttgtagcgcccgcgccagcgaactgtacaaaattttcctcgaaggtgagtgtgtcgtcactaacagccggacggcggaaatgtgtaagctcaccgaaaacagcttccgcgatgtgaatatcgcttttgctaatgaattgagcctgatttgtgccgatcaggggattaacgtctgggaactgattcgcctggcgaatcgtcaccctcgcgttaatattcttcagcctggccctggcgtgggcggtcactgcattgctgttgatccgtggtttatcgtggcacagaacccccagcaggcgcggcttatccgtaccgcgcgcgaagtgaacgatcacaaaccgttctgggttatcgatcaggtgaaagcggcggtggctgattgcctggcggctaccgataaacgcgccagtgaactgaaaatcgcctgctttggtctggcgtttaaaccgaatattgatgacctgcgcgaaagcccggcgatggaaatcgctgaactgatcgcccagtggcatagcggcgaaactctggttgttgagcctaacatccaccagttgccgaaaaaactgaccgggctttgtactctggcgcagcttgacgaggcgctggcaacggcagacgtgctggtgatgctggtcgatcatagtcagttcaaagttatcaatggcgacaatgtccatcagcagtatgtcgtcgatgccaaaggagtctggcgctgatgagaaaaattctgataacaggtggtgccgggtttattggcagcgcgctggtgcgttatatcatcaacgaaacgagcgacgcggtggtagtggtcgataagctgacctacgccggaaacctgatgagcctggcaccggtcgcgcaaagcgagcgctttgcctttgagaaagttgatatctgcgatcgggcagaactggcacgcgtattcactgagcatcagccagactgtgtcatgcatctggcagccgaaagccatgttgaccgttctattgacggcccggcagcgtttattgaaaccaacattgtcgggacttatacattgcttgaagcggcgcgggcttactggaatgcgctgacggaagataaaaaaagtgcgttccgttttcatcatatctccactgacgaagtatatggtgacctgcacagcacggatgatttcttcaccgaaaccacgccgtatgcgccgagcagcccttattccgcgagtaaagccagcagcgaccatctggtgcgcgcctggctgcggacctatggtctgccgacgcttatcaccaactgcagcaataactacggcccttaccactttccggaaaaactgatcccgctgatgatcctcaacgcgctggcgggtaaaagcctgccggtatatggcaacgggcagcaaatccgtgactggctgtatgtggaagatcacgcccgcgcgctgtattgcgtggcgaccaccgggaaagtcggtgaaacctataatattggtggtcacaacgagcgtaagaatctcgatgttgtggaaaccatttgcgagctgctggaagaactggctccgaacaagccgcacggcgtggcgcactatcgtgacctgatcacctttgtcgctgaccgtccggggcatgatctgcgttatgccattgatgctagcaaaattgcccgtgaacttggctggctgccgcaggaaacctttgaaagtggaatgcgtaaaacggttcagtggtatctggctaatgaaagctggtggaagcaggtgcaggacggcagctatcagggcgagcgtttaggtctgaaaggctaattttcagcggaggcaaacatgaaaggtattatcctggcgggcggttccggcacccgattgcatccgattacgcgcggcgtaagcaagcaactgttgccgatttacgataagccaatgatttactatccgctgagcgtgctgatgctggccggtatccgcgaaattctcatcatcactacgccggaagataaaggttatttccagcgcctgctgggcgatggtagtgagttcggtatccagctggaatatgccgaacagcccagcccggacggtctggcgcaggcctttatcatcggtgaaaccttccttaatggtgaaccttcttgtctggtgctgggcgataacatcttcttcggtcagggcttcagtccgaagctgcgtcatgttgcggcgcgcaccgaaggggcgacggtttttggctatcaggtgatggacccggaacgctttggcgtggtggagtttgacgacaatttccgcgctatcagcctggaagaaaagccaaaacagccgaagagtaactgggcggtgaccgggctttatttctacgacagtaaagtcgtggagtacgcaaagcaggtgaagccgagcgagcgtggtgaactggagattacctccatcaaccagatgtacctcgaggcgggcaacctgaccgttgaactgctcgggcgcggatttgcctggctggataccggcactcacgacagcctgattgaagccagcacctttgtacagacggtggaaaaacgccagggctttaagattgcctgcctggaagagattgcctggcgtaacggctggctcgatgacgagggtgtgaagcgtgctgccagtagtttagcgaaaactggctacggccaatatctgctggagttacttcgtgcccgtccgcgccagtattgagccactaacctgggaaaacgccttctttggtgttaacagcgccatcgtgcgcattacgtctgaagcaccgctcctgacgccagacgcgttagcgccgtggtcacgggtgcaggccaaaattgcggcaagtaatacgggtgaactggatgccctgcaacagctgggattctccctggtagaaggtgaagttgatttggcgctacccgtgaacaatgccagtgatagcggtgctgtagtggcacaagagaccgatattcccgcattacgtcagttagccagcgccgcatttgcgcaaagccgttttcgtgcgccgtggtatgcgcctgacgccagcagtcgcttttatgcacagtggattgaaaatgccgtgcgcggcacctttgatcatcaatgtctgattttacgtgcggcgtccggcgatattcgcggctatgtctctttacgggaactcaatgcgacagatgcgcgaattggcctgctggctggacgcggtgcaggtgctgagctgatgcaaacggcgctaaactgggcgtatgctcgcggtaaaacaactttgcgggtggcgacccaaatgggcaacaccgccgcgcttaaacgatacatacaaagtggtgcgaatgtagaaagcaccgcgtactggttatacaggtgatcacatgattccatttaacgcaccgccggtggtgggaaccgaactcgactatatgcagagcgcaatgggtagcggcaaactgtgtggcgatggcggttttacccgtcgctgccagcagtggctggagcaacgttttggcagcgccaaagtgttactgacgccgtcctgcaccgctagcctggagatggcggcgctgctgctcgatatccagcctggcgatgaagtgatcatgccgagctacacctttgtctccaccgccaatgcctttgtgctgcgtggcgcaaaaatcgtttttgtggatgttcgcccggacaccatgaacatcgacgaaacgctgattgaagcggcgatcaccgacaaaacgcgcgttatcgtgccggtccattacgcgggtgtggcctgcgaaatggacaccattatggcgttggcgaaaaagcataatttgtttgtggtagaagatgccgctcagggcgtgatgtccacttacaaagggcgtgcactgggaaccattggtcatattggctgctttagcttccatgaaaccaaaaactacacggcgggcggtgaaggcggcgcgacgctgattaacgataaagcgttaatcgaacgagccgagatcatccgtgaaaagggcactaaccgcagccagttcttccgtggtcaggtcgataaatatacctggcgcgatattggctccagctatttgatgtccgatctgcaagctgcatacctgtgggcgcaactggaagcagcggatcgtatcaaccagcaacgtctggcgctgtggcaaaactactacgatgcgttagcgcctctggcgaaagccgggcgtatcgagctgccgagcattcccgatggctgcgtgcagaacgcgcatatgttctacattaaactgcgggatattgatgaccggagcgcgttgattaactttctgaaagaagcggaaatcatggcggtgtttcattacattccgctgcacggttgccctgcgggggaacactttggtgagttccacggtgaagatcgctacaccaccaaagagagcgagcgcctgctgcgcctgccgctgttctacaacctgagccccgtcaatcagcgtacggtaattgcgactttgttgaactacttttcctgatatgagcttggcaaaagcgtccttgtggacggcggccagtacactggtcaagattggtgccgggttactggtcggtaagttgctggcggtgagttttggtccggcggggcttgggctggcggcaaatttccgccagttgattaccgtgctcggcgtgcttgccggggctggcatctttaacggtgtaaccaaatacgttgcccagtaccatgataatccgcaacagctgcgccgcgtggtcggcactagtagtgcgatggtacttggtttctctacgctgatggcgctggtttttgtgctggcagctgcgccaatcagccagggattgtttggtaataccgactatcaggggctggtgcgtttagtggcgctggtgcaaatggggatcgcctggggcaacctgttactggcgctgatgaaaggctttcgcgatgccgcaggtaatgcgttaagcctgattgtcggcagcttgattggcgttctcgcgtactacgtcagttaccgtttgggcggttatgaaggggcgttgctgggtctggcgctgattcccgcgctggtggtaattcctgccgccatcatgttgatcaaacgtggtgtcatcccgttaagctatctgaaacccagctgggataacggtctggcagggcagttgagcaaatttacgctcatggcgttgattacgagcgtgaccttgcctgttgcttacatcatgatgcgtaaactgctggcggcgcagtatagctgggatgaggtggggatctggcaaggggtgagcagtatttccgatgcctacctgcaatttattacggcaagcttcagcgtatatttgctgcccacgttgagccggctaacggaaaagcgcgatatcacccgggaagtggttaaaagcctgaaattcgtcttaccggcagtggcggcggcgagttttaccgtctggctgctgcgtgattttgctatctggctgctgttgagcaataaatttaccgctatgcgcgatctctttgcctggcagttagtgggtgatgtgttaaaagtgggcgcttatgtctttggttatctggtgatcgccaaagcgagtctgcggttttatattctggcggaagtcagccagttcactttattgatggtatttgcccactggctaatccctgcgcatggtgcactgggcgcggcgcaggcatatatggcaacttatatcgtctatttttctctttgttgtggcgtgtttttactctggcgtaggcgggcatgactgtactgattcacgtactgggaagcgatatccctcaccataaccgaaccgttttgcggtttttcaatgacgcgctggccgcgacgagcgagcacgcgcgcgagtttatggttgttggcaaggacgacggcttaagtgatagctgtccggcgctttctgtgcaatttttccctgggaaaaaaagcctggcggaagcggtcatcgcgaaagcaaaagctaaccgtcagcagcgttttttcttccacggtcagttcaatcccacactgtggctggctctgctgagtggtggcattaagcccagccagtttttctggcatatctggggggcagacctgtatgagctttccagtggcttgagatataagcttttttacccactacgtcgcctggcgcaaaagcgagtcggctgtgtatttgccacccgcggcgatttgagcttttttgccaaaacgcacccaaaggtgcggggcgaactgctgttcttcccgacgcggatggaccctagcctcaatacgatggcgaacgatcggcaacgtgaagggaaaatgaccattctggtggggaactccggcgaccgcagcaatgagcatattgctgccttgcgcgccgttcatcagcaatttggcgatacggtaaaagtggtggtgccgatgggatatccgcctaataacgaagcgtacattgaggaagttcgtcaggcggggctggagttattcagcgaagaaaatctacaaattctgagcgaaaaactggaatttgacgtctatctggcgctacttcgtcagtgcgatcttggttactttatttttgcccgccagcagggcattggtacgctgtgcttactgattcaggcgggcattccttgtgtgcttaaccgggaaaatccgttctggcaggatatgacggaacaacatttgccggtgctgtttactaccgacgatctcaacgaggatattgtgcgtgaagcgcagcgccagttggcgagcgtggataaaaacaccattgccttctttagccctaactatctacaaggctggcagcgggcgttggcgattgccgccagggaggtcgcatgagtctgctgcaattcagtggcctgtttgttgtctggctgctctgcacgctgtttattgccacgctgacctggtttgagtttcgccgtgtgcgctttaacttcaatgtcttctttagtttgctgtttttgctcacctttttcttcggcttcccgctgaccagcgtgctggtatttcgctttgatgttggtgtcgcgccgccagaaatcttgttgcaggcgttgctttctgcgggctgcttctacgcggtttactatgtcacctacaaaacccgcctacgcaaacgcgttgctgatgtaccgcgccgtccgctgtttaccatgaaccgcgtggagaccaatcttacgtgggtgatcctgatgggtatcgcgctggtaagcgtcggcatcttcttcatgcacaacggctttttgctgttccggcttaactcctacagtcagatcttttccagtgaagtctccggcgtggcgttaaaacgcttcttttactttttcatcccggcgatgctggtggtctactttctgcgccaggacagcaaagcgtggctgtttttcctcgtcagcacggtcgcctttggcttgctgacttatatgattgtcggcggcactcgcgccaatatcatcatcgcattcgctatcttcctgtttattggcattattcgcggctggattagcttgtggatgctggcggcggcgggcgtgctggggattgttggcatgttctggctggcactaaaacgctatggaatgaatgtgagcggcgatgaagcgttctatacgtttctctatctcactcgcgacaccttcagcccgtgggagaatctggcgttgctgttgcagaactacgacaacatcgacttccagggcctggctccaattgtccgcgatttctatgtctttatcccttcctggctgtggccgggtcgcccgagtatggtgctgaacagtgccaactactttacctgggaagtgctgaataaccactccggactggcgatcagccctacgcttataggcagtctggtggtgatgggcggcgcgttgttcatcccgctcggggcgatcgtggttggtctgatcatcaaatggttcgactggctgtatgagctgggcaaccgcgagcctaatcgctataaagctgcgatattgcacagtttctgctttggggcgatcttcaatatgatcgtgctggcgcgtgaagggctggatagctttgtcagtcgcgtggtcttttttatcgtggtcttcggcgcatgtctgatgatcgcaaaactgttgtactggctttttgaaagcgccggactcattcataaacgtacaaaaagtagcctccggacgcaggttgaaggataacaatgaataacaacaccacggcaccaacctatacgctgcgtggcttacagttgattggttggcgtgatatgcagcacgccctcgattatctgtttgctgacgggcagcttaagcagggaacgctggttgccattaatgctgaaaaaatgctgactattgaagataacgccgaggtcagggagttaattaacgctgccgaatttaaatatgcggatggcatcagcgttgtacgtagtgtacgtaaaaagtacccgcaggcgcaggtttcccgcgttgccggtgccgatctctgggaagagctgatggcgcgcgcaggcaaagaagggacgccggtatttcttgtgggcggtaaacctgaagtgctggcgcaaactgaagctaaactgcgcaaccagtggaatgtgaatatcgttggcagtcaggatggttattttaaacccgagcagcgtcaggcgctgtttgaacgcattcatgccagcggtgcgcaaatcgtcaccgttgcgatgggaagcccaaagcaggagatcatcatgcgcgactgccgtctggtacatccagatgcgctgtatatgggcgttggcgggacttacgatgttttcaccggtcacgtaaaacgcgcaccgaaaatctggcaaacgctggggctggagtggctctaccgcctgcttagccagccgagccgcattaagcgtcagcttcgtttgctgcgttatttacgctggcactacaccggcaacctatgattttcctctctttgtaaagcgacggagtggtcactccgtcgcctgtctgcttttttattacacaaagcattcaaatttttaatgctttatttgccatttctcctgaattacgaaaacatttgcaacactcgatgtacccataacgataaccggtaacaccggaaagcatgcaaacacaacacgaggatttatggcagataacaaaccagagctacagcgtgggctggaagctcgacatatcgaactcatcgccctggggggcaccattggcgtcggcctgtttatgggggccgccagtaccctgaaatgggccgggccatccgtattgttggcctatatcatcgccgggctgttcgtctttttcatcatgcgtagtatgggcgaaatgttgttcctcgaaccggttaccggtagcttcgccgtttatgcgcatcgttatatgagcccgttctttggctatctcaccgcctggtcttactggtttatgtggatggcggtggggatctctgaaatcaccgccattggcgtttatgtccagttctggttcccggagatggcgcagtggatacccgcattgatcgcagtggcgctggtggcgttggcgaatctggcggcggtgcggttgtacggcgaaatcgagttctggttcgcgatgatcaaagtcaccacgattatcgtgatgattgtcattggcctgggcgtgattttctttggctttggcaatggcgggcagagcattggttttagcaatctcacagagcatggcggtttctttgcgggtggctggaaagggttcctgaccgctctgtgtattgtggtggcgtcctaccagggcgtggagctgattggcattactgccggtgaagcgaagaatccgcaggtgacgctgcgcagtgccgtaggcaaggtgctgtggcggatcctgattttctacgtaggcgcgattttcgttatcgtcaccatcttcccgtggaatgaaataggcagcaacggcagcccgttcgtactgacttttgccaaaatcggtattaccgcagcggcgggcattatcaactttgtggtgctgacggctgcgctctctggctgtaacagcggcatgtacagttgcggacgtatgctctacgcactggcgaaaaaccgtcagttaccggcggcaatggcgaaagtttcccgtcacggcgtaccggttgcgggtgtggcagtatctattgctattctgctaattggcagttgcctgaactacatcattcccaatccgcagcgtgtgtttgtctacgtctacagtgccagcgtgcttccggggatggtgccatggtttgtgatattgataagccagctgcgttttcggcgtgcacataaagcggcgattgccagccatccgttccgcagtatcctgttcccgtgggccaattacgtaacaatggcattcctgatttgcgttttgatcggcatgtactttaatgaagatacgcgtatgagcctgtttgttggcatcatctttatgctggcggtgacggcgatttataaagtttttggccttaatcgccacgggaaagcgcataaactggaggaataagcagcaaaacgcacaaaccgtaaccaaacgcgcaatttatttaaaaagggactagacagaggggtgggaagtccgtattatccacccccgcaacggcgctaagcgcccgtagctcagctggatagagcgctgccctccggaggcagaggtctcaggttcgaatcctgtcgggcgcgccatttagtcccggcgcttgagctgcggtggtagtaataccgcgtaacaagatttgtagtggtggctatagctcagttggtagagccctggattgtgattccagttgtcgtgggttcgaatcccattagccaccccattattagaagttgtgacaatgcgaaggtggcggaattggtagacgcgctagcttcaggtgttagtgtccttacggacgtgggggttcaagtccccccccctcgcaccacgactttaaagaattgaactaaaaattcaaaaagcagtatttcggcgagtagcgcagcttggtagcgcaactggtttgggaccagtgggtcggaggttcgaatcctctctcgccgaccaattttgaaccccgcttcggcggggttttttgttttctgtgcatttcgtcaccctcccttcgcaataaacgcccgtaataactcattgccccacggtatgatttcgcccttaacgtattgaaggatgacttcaggcaaggagcgaccatgctgcaacaggttccaacgcgtgcttttcatgtgatggcgaaaccgagcggttccgattgtaatctgaactgtgactactgtttttatctcgaaaaacaatccctttaccgcgaaaagccagtcacgcatatggacgatgacacgctggaagcgtatgtccgtcactatatcgctgccagcgaaccgcaaaacgaagtggcttttacctggcagggcggcgaaccaacgctactcgggctggcgttttaccgccgtgccgtagcgctacaggcgaaatatggtgctggcaggaagataagtaacagcttccagactaacggcgtgctgctggatgacgaatggtgcgcgtttctcgcggagcatcattttcttgttggtttaagcctggatggcccgcctgagatccacaatcaatatcgcgtgactaaaggtggcagacccacgcataagctggtgatgcgtgccctgacgctcctgcaaaaacatcatgtcgactataacgtgctggtctgcgttaatcgcaccagcgcgcagcaaccgttgcaggtatatgattttttgtgcgatgcgggagtcgaattcatccagtttattccggtggtcgagcgcctggctgatgaaacaactgcccgcgatggacttaagttacatgcgcctggtgatattcagggtgagctaacggaatggagcgtgcgccccgaggagttcggtgagtttctggtggcgatattcgaccactggatcaaacgcgacgtcggcaagattttcgtgatgaatatcgaatgggcgtttgccaattttgtcggtgcgccgggtgcggtttgccatcatcagccaacctgtgggcgcagcgtgattgttgagcacaacggcgacgtttacgcctgtgatcactatgtttatccgcaatatcggctggggaatatgcaccagcaaacaattgcagaaatgatcgattccccgcaacagcaggcgtttggtgaagataaatttaagcagttaccggcgcagtgtcgcagttgtaacgtgttaaaagcgtgctggggaggctgcccgaaacaccgcttcatgctcgatgccagcggcaaaccgggactgaattatttgtgtgccgggtatcagcgttatttccgccatctaccgccatatcttaaagcaatggctgatttgctggcgcacggtcgcccggccagcgacattatgcatgcgcatttgctggtggtgagtaagtaaaaatcggcggccgcctgcggttgattgccggatgcggcgtaaacgccttatccggcctacatgatcgtgcaaattcaataaattgcagcgttctgtaggctggataagatgcgtcagcatcgcatccggcaaaggcagatctcagcgatagcgccggcttagtcagatttaatctgcgcgcgtggtggatattttttcaggatctccatatacgcgtgcatttcggtctgtagcggtacacccatcggaatatggcgcacgccgatggagtcgctttcctgcggatcggtgtagaggttaaacacgctgcttcccgccgtttgcattactgtgccggtgaatccaccctgatatccgctctgggtataagcgtaaggttgctgaatcaggacgtgatacttgaactcatccatacgcacagcagcgagtttaccgttgaggaagtagtgctcggccttacggttagactgaccatttgttcccaggaagaaggatgtctggtccacaccatcgataaaggtggttttcggcactaaattcgccactttcgctccaggatgccctgccagatccagcgcggtagggaagagatctgccagatcgacaataccgtcagatttacgcggttggatcatccctttccagtaaacgaaagtcggtacgcgaacgccgccttcccaggtgctacctttcgcaccacggaacggggtgcgtccgtgcggcggtacttcggcttccggtccgttatcggaggtaaagacgatcagcgtgttatcaagctgaccgtttttctccagtgttttatacagattagcgaacacatcgttcatctccaccatgcagtcgccatagctggtgcgtgccggagagctacccgcatatttcgcatttgggtagttatcgaagtggcagccacgagtgccgtagtagaggaagaatggtttatcgctcttcgccatcttgtcgaggaacttaacgccatagtccatccagcgttgatccagatcttccatatatttcggcgtaatgtcggcaatggcctgttgttcgccgccgcgcaccgcatgaacgtcatctttgctgaacggtaattgcttgatgtattcagaacggtccggactcagggccacttccggattgacgtgaacgtcgcgccattcggtgtacatatcagacacgctgttaaagccacggaaatcatcaaagccaacgttctgcggctggctctctttgttttcccccatatgccattttccgatggcctgagtgacgtagccctgatcgtgcagcaactgcggcagcgtggttaacccttgcagcccgcccggttgcccgtacattggcggcatcagaatgccgtggtggatggagtattgtccggtgagaatggtggcgcgggttggggaagagcttggttgagaatacgcgctagttaaaatcagcccctggctggcaacggcgtcgatatctggtgtagggttacccaccgccacgccgccaccgttaaaaccgacgtccatccagcccacatcgtccagcaagaaaacaaccacattcggtttcttaccggtttttttctcaagttctgccagcttctgctgggtttctttatcctgcgccggatgctgcattactggcatcatattgtcggcaatagtggtcgccggtttaaccagatactggtttgggtgatcgtatccggcaaagcctttgcgtgcggtggcagtactcggggtatctgctgcgctggccatgagaggaagagcggcggcgacagcaacaacaagacgtttgggactaaagctaaattccatgcaaaatgctccggtttcatgtcatcaaaatgatgacgtaattaagcattgataattgagatccctctccctgacaggatgattacataaataatagtgacaaaaataaattatttatttatccagaaaatgaattggaaaatcaggagagcgttttcaatcctacctctggcgcagttgatatgtaaggcaggtttattatatcgcgttgattattgatgctgtttttagttttaacggcaattaatatatgtgttattaattgaatgaattttatcattcataataagtatgtgtaggatcaagctcaggttaaatattcactcaggaagttattactcaggaagcaaagaggattacagaattatctcataacaagtgttaagggatgttatttcccgattctctgtggcataataaacgagtagatgctcattccatctcttatgttcgccttagtgcctcataaactccggaatgacgcagagccgtttacggtgcttatcgtccactgacagatgtcgcttatgcctcatcagacaccatggacacaacgttgagtgaagcacccacttgttgtcatacagacctgttttaacgcctgctccgtaataagagcaggcgtttttttatgtatcaggaaggccccggaggtgcttgcctccgggtgagaaggaattactgtggcgggttattctgcaacgttaacatcaaaccgtcgcgacgcatagctgcagcttcttccggcttgtgcagtctgtccagcgcgtcggcaagccatgcgtaatcgtaggcgtccggacgttgtttcagcgctgcgcggaaggcgaggcttgcttcctgccattctccgtgcttcatcagactctggcccagtgtgctccacaacagcgggcgatcgccgacgtttttgatttgctggcgcagcactttttccagctgttccggattgtttgttttcagtcgaggaatcggcagcagtaggcgatcgtcgtactggcgtttcaggccatcgatgataatttgctgggcagtatcatgatcgtcacattcaataagatgttccgccattgccacctgcaacgctacctgatgacgcgttttccggctttggtttttccaccagttacgcaaaccttcgctaccgttatcggcacgcgcctgatccatcaggccaatccatgcctgttgttccagcattgcacgatgttcttcatcaccaacatgggctttcgccatacttgggataatatccagcaggctactccatgcacctgtgcggatatacgcctgttccgccagacgtaatacttccggatggcgtggcgtaacttccagcagcttatccacgccgtggcgtgcagcatggttttcattacgggccagttgcagacgtacgcgggtgatttctaccggaatggtgtcgttgccggccagctccgctgcgcgttccagatgttggttggcgcgtgcttcatcaccacgttgttgcgcggcttcggcagccagtagatagttcaccaccggttgttccgcgtgatcggcatttttcgccatcagcttttcaacttgctgataatcgccttccgccagtttcagcagcgcctgttcggtctgcttacgtgcacggcgacgcttacgtccgacaaaccacccacgggtgtgcgcgccagtgcggaagatccgccgcagtagccactcaatggcaaacagcactaccatcgccagaatcaatatgatcgccaggcccgtgacgctggtttcgatattgtagttgtcggtctggatcagcacataaccctgatggccggcaatcatcgggccaaccacgatccccgcaatcagcaacacaaagagcaataacacttttagcatggttattctccttgcggcgcggctgccggagtatcagcttgcggtgcaggtgcaggtttagcttccgttgtccccgctgccggttgtgccagcaggttacgcacgcgagtctgcatcagtttttccagcatcgcctggctttgcagggtttccggaagatccatgctgatattttgctggcttaactggtccacctcgtcgaggaacgctttggtggtggcatcatcagtatcgtagtaagcacgtacccaggtggagacgttctccagcgcctggcgataagtctcttcctggtgacgcggtacagcttgtgctgcgaccagcaggcgagagcgaatattttcgcgcagatagatatcctgatttggcgctaacagcggtacggcggtgtcatcacgacggcgaatcgtaatgaagttgtccataaagttctgccagcttttttgcagattgatacgccattcgctgatggaactggaaagctcttcaccgtcactatccatcgggctaccatcgctgtcattatcggccagacgcaggttatctacctgattactaagctgattaagcttaaggatgatgccgtcataatccacctggcttactgcagaaaggctggcgatatcatcggtaattgcccgacgaacggtaatcagactcgggtcattcatatccgccaggctggcgtctgcacttttcagcaacgctgcagcggtcgtgacgtcctgatcgctccacagcttccgtccggcgagtttcaccagaaaatcggcctgagccagcagccaggttttagcatcgctgccggaaatggtggcgaccttttgttggacttcatccaactgttttgccagcgtttcttgctgacgattcgcctgcttaagttgtgcagcttgttgcttaataatgccttccagctcggctttttggctctcctgggctttttgcaatgccgtcagttggttagccagggcatcgctggtggcggtctgattgacggcctgttgtttaccccagccatacaaaccgatgcccgccgccagagcaatagcgatagccaccgcgctgagaatcaatgcggtattgttcttactctttttttctgttgcgacaggttgactcgtggtgtccacggcctccctggtctcttcaaccacggcggaggttttttcttgttccgtcattatggcttcctgttatgagagttattgtaatgcccgtaaaagcgcatcgttgtcagcgttatcggcgaccttaatgtcttgccagcccagttcccgggcgagtttcgccaaacgctcactgacgaccaatagtcgacagtgtagtaaccagtgctcacgataccattgtgggatcaggctccagagttgctgcaacatttcaccgctggtaacaacgaccatcgtcacctcgcgggcttgccagcgcatcgcttcttctgcaccatcgtaatggattgcgcatcgttgataacattcacaaaaagtgacctcagcaccgcgcgccgtcagggtatccccaattagctcacgaccaccattgccacgtaatatcagcgcacgtttgcccgcaatattttgtaattcaggtaattgtagcaagacttcgctgatttcccgatcctgcgggtagagaatcttctgtccacttacggtatgtagtgccagtgcggtggtgcgtccaatggcgaaataatcaggtagtcggggccatttacgatcttgctgatgcagctgactttgggcaaaagcaaccgcgtgttggctgagggcaaacaacagatcgctctcccccagcgctgccagttgatcagcaagttgcggtaattgttgacccggagaaaactcaatcagcggaaaatgccaggccacctgccccagtgtgcgcagacggctcactaactcttctccagcgggagacgggcgggtgacaaggatactcatgccggggcgtctccgttatagacttcagcgaggatctcgcgcgcgccgttattcagtagctcttctgccaggctaatccccatttgttcggcatcttgcggcgcaccgcggcgttcaccgcgaataatctggctaccgtccggcgcgccgaccagcgcacgcagccagatttcgccatcaataagctcggcgtagctaccaattggcacctgacatccgccttcgagacgggtattcatggcgcgttctgcggtaacgcgcagtgcagtttcgtggtgattcagcgcggcaagcagctcgcgagtgcgactatcatcaaggcggcattcaatacccaccgcaccttgtcctaccgccggaagagaaatctcgggtggcaacgcggcgcgaatacgactctccagacctaaacgttttagtccggctacggcaagaatgatggcatcgtattcgccgttatccagtttgctcaggcgagtgccgacgttgccgcgcagggagcggataatcagatccggacggcgttcagccagttggcactggcgacgtaaactggacgtcccgacgatactgcctgccggtaacgcatccagactgtcatagttattggacacaaaggcatcgcgaggatcttcacgctcacaaatagtgaccagtcccagaccttgcgggaattcaaccggcacatctttcatactgtgtacggcgatatcggcgcgattttcgaggagcgcgacttccagctcttttacaaataagccttttccgcctactttcgccagcggcgtatcaagaatcacatcgccgcgcgtcaccatcggtaccagttcaacgaccaggcccggatggctcgccatcaacttgtctttgacatagtgtgcctgccagagtgcaagtgggctttggcgtgtggcaattcttaaaacattgtctaacatgcttgttaccgtcattatcatccgtggtccatcctaacatccttgccagagtgatgtcagtgttgtggtgaaacgtagacgcctgcgcaaaccgtaaaatgaggtctggcagtggatcctgacaggcgtttcacgccgttgtaataaggaatttacagagaataaacggtgctacacttgtatgtagcgcatctttctttacggtcaatcagcaaggtgttaaattgatcacgttttagaccattttttcgtcgtgaaactaaaaaaaccaggcgcgaaaagtggtaacggttacctttgacatacgaaatatcccgaatgccgcgtgttaccgttgatgttggcggaatcacagtcatgacgggtagcaaatcaggcgatacgtcttgtacctctatattgagactctgaaacagagactggatgccataaatcaattgcgtgtggatcgcgcgcttgctgctatggggcctgcattccaacaggtctacagtctactgccgacattgttgcactatcaccatccgctaatgccgggttaccttgatggtaacgttcccaaaggcatttgcctttacacgcctgatgaaactcaacgccactacctgaacgagcttgaactgtatcgtggaatgagtgtacaggatccgccgaaaggtgagcttccaattactggtgtatacaccatgggcagcaccagctccgtagggcaaagttgttcctctgacctggatatctgggtctgtcatcaatcctggctcgatagcgaagagcgccaattgctacaacgtaaatgtagcctgctggaaaactgggccgccagcctgggtgtggaagtcagcttcttcctgattgatgaaaaccgcttccgtcataatgaaagcggcagcctggggggcgaagattgtggctccacccagcatatactgctgcttgacgaattttatcgtaccgccgtgcgtctcgccggtaagcgtattctgtggaatatggtgccgtgcgacgaagaagagcattacgacgactatgtgatgacgctttacgcgcagggcgtgctgacgccaaatgaatggctggatctcggtggcttaagcagcctttctgctgaagagtactttggtgccagcctttggcagctctacaagagtatcgattccccatacaaagcggtactgaaaacactgctgctggaagcctattcctgggaatacccgaacccacgtctgctggcgaaagatatcaaacagcgtttgcacgacggcgagattgtaagctttggtctcgatccatactgcatgatgctggagcgtgttactgaatacctgacggcgattgaagattttacccgtctggatttagtacgtcgctgcttctatttaaaagtgtgcgaaaagctcagccgtgaacgcgcctgcgtaggctggcgtcgcgcagtgttgagccagttagtgagcgagtggggttgggacgaagctcgtctggcaatgctcgataaccgcgctaactggaagattgatcaggtgcgtgaggcgcacaacgagttgctcgacgcgatgatgcagagctaccgtaatctgatccgctttgcgcgtcgcaataaccttagcgtctccgccagtccgcaggatatcggcgtgctgacgcgtaagctgtatgccgcgtttgaagcattaccaggtaaagtgacgctggtaaacccgcagattagtcccgatctcagcgaaccgaatctgacctttatttatgtgccgccgggccgggctaaccgtagtggttggtatctgtataaccgcgcgccaaatattgagagcatcatcagccatcagccgctggaatataaccgttacctgaataaactggtggcgtgggcatggtttaacggcctgctgaccagccgcacccgtttgtatattaaaggtaacggcattgtcgatttgcctaagttgcaggagatggtcgccgacgtgagccaccatttcccgctgcgcttacctgcaccgacaccgaaggcgctctacagcccgtgtgagatccgccatctggcgattatcgttaacctggaatatgacccgacagcggcgttccgcaatcaggtggtgcatttcgatttccgtaagctggatgtcttcagctttggcgagaatcaaaattgcctggtaggtagcgttgacctgctgtaccgcaacagctggaacgaagtgcgtacgctgcacttcaacggcgagcaaagcatgatcgaagccctgaaaactattctcggcaaaatgcatcaggacgccgcaccgccagatagcgtggaagtcttctgttatagccagcatctgcgcggcttaattcgtactcgcgtgcagcaactggtttctgagtgtattgaattgcgtctttccagcacccgccaggaaaccgggcgtttcaaggcgctgcgcgtttctggtcaaacctgggggttgttcttcgaacgcctgaatgtaagcgtacagaaactggaaaacgccatcgagttttatggcgcgattagccataacaaactgcacggcctgagtgtgcaggttgaaaccaatcacgtcaaattaccggcggtggtggacggctttgccagcgaagggatcatccagttctttttcgaagaaacgcaagacgagaatggctttaatatctacattctcgacgaaagcaaccgggttgaggtatatcaccactgcgaaggcagcaaagaggagctggtacgtgacgtcagtcgcttctacagcagtagccatgaccgttttacctacggcagtagcttcatcaacttcaacctgccgcagttctatcagattgtgaaggttgatggtcgtgaacaggtgattccgttccgcacaaaatctatcggtaacatgccgcctgccaatcaggatcacgatacgccgctattacagcaatattttagctgatgaacgtgccggaaagcgaggcttatccggcatgcaatcttagcggaaactgactgtttcacccgcctgctgcgtcgccgcctgttccagcaaatcccagaaggtttcgccgctgcgatcacaaatccactcatcgcctttcaggtcaaaatggtagccgccctgtttggttgccagccatacctggtgcagcggctcctggcggttgataatgattttgctgccattctcaaaggtaatggtcagtacgccgccgttgatttcgcagtcgatatcgctgtcgccatcccagtcgtccaggcgttcttcaatggtcagccagagttgatcagccaggcgatgaaattcactgtcgttcattgttgtatcctgtttttaagtgatggcggcagtatagcggcatggggtcagggcttcaaagtttgcacctctgcggctgcgttccggcacgatagttccgtcaccggaataatgatgtctctgtgtagcgaaagatttgtctctagtttagggcgcagttacaccacgtctttccctgtttctggtaaacattatgatcaggtttaccgagcgagcatcctcacgctgacggaactaaaaaagacaacaaacaaaccacattgcgatagtgcataaagccatcctggcgcgaggtgccgatcacgaaactaccagcaaaacataaatccccacgagtaagcgttatactcgcagcatttcctcacttttcagacttcataaagagtcgctaaacgcttgcttttacgtcttctcctgcgatgatagaaagcagaaagcgatgaactttacaggcaatccataatgaaaaacgtgtttaaggcactcactgtattacttactctcttcagcctgacgggctgcggtctgaaaggtccgctctatttcccgcctgcagataaaaacgcaccgccgccgaccaaaccggtagagacgcaaacgcaatccacggtgccggataaaaacgatcgcgccactggcgatggtccatcccaggtgaattactaaaagtcagtttctgtacccgcgtgattggagtaaatgatgcagttcagcaaaatgcatggccttggcaacgattttatggtcgtcgacgcggtaacgcagaatgtcttttttagtccggagctgattcgtcgcctggctgatcggcacctgggggtagggtttgaccaactgctggtggttgagccgccgtatgatcctgaactggattttcactatcgcattttcaatgctgatggcagtgaagtggcgcagtgcggcaacggtgcgcgctgctttgcccgttttgtgcgtctgaaaggactgaccaataagcgtgatatccgcgtcagcaccgccaacgggcggatggttctgaccgtcaccgatgatgatctggtccgcgtaaatatgggcgaacccaacttcgaaccttccgccgtgccgtttcgcgctaacaaagcggaaaagacctatattatgcgcgccgccgagcagacaatcttatgcggcgtggtgagcatgggaaatccgcattgcgtgattcaggtcgatgatgtcgataccgcggcggtagaaacgcttggtcctgttctggaaagccacgagcgttttccggagcgcgccaatatcggttttatgcaagtggttaagcgcgagcatattcgtttacgcgtttatgagcgtggggcaggagaaacccaggcctgcggcagcggcgcgtgtgcggcggttgcagtagggattcagcaaggtttgctggccgaagaagtacgcgtggaactccccggcggtcgtcttgatatcgcctggaaaggtccgggtcacccgttatatatgactggcccggcggtacatgtctacgacggatttattcatctatgaagcaaccaggggaagaactgcaggaaacactcacggagcttgatgaccgggcggttgtcgattatctgattaaaaatcctgagttttttatccgtaatgcgcgcgcagtagaagcgatacgtgtgccgcatccggtacgcggcaccgttagcttggtcgagtggcacatggcccgcgcacgtaatcatattcatgttctggaagagaacatggcgctgttgatggaacaggctatcgccaacgaaggcctgttttatcgcctactctacctgcagcgcagtctcaccgccgccagcagtctcgacgatatgctgatgcgctttcaccgctgggcgcgcgatctcggcctggcaggtgcgagtctgcgcctgtttccggatcgctggcgcttaggtgcgccgagcaaccacactcatctggcattaagccgtcagtctttcgaaccgctgcgtattcagcgtttggggcaggaacagcactatcttgggccgcttaacggaccagagctgctggtggtgctaccggaagcgaaagcggtgggaagcgtggcgatgagcatgctgggaagcgatgctgatttgggtgtcgtgctgtttaccagtcgcgatgccagtcactatcaacaagggcaaggaacgcagttacttcatgaaattgcgctgatgttgccggagcttctggagcgttggattgaacgcgtatgaccgatttacacaccgatgtagaacgctacctacgttatctgagcgtggagcgccagcttagcccgataaccctgcttaactaccagcgtcagcttgaggcgatcatcaattttgccagcgaaaacggcctgcaaagctggcagcaatgtgatgtgacgatggtgcgcaattttgctgtacgcagtcgccgtaaagggctgggagcagcaagtctggcgttacggctttctgcgctacgtagcttttttgactggctggtcagccagaacgaactcaaagctaacccggcgaaaggtgttagcgcaccgaaagcgccgcgtcatctgccgaaaaacatcgacgtcgacgatatgaatcggctgctggatattgatatcaatgatcccctcgctgtacgcgaccgtgcaatgctggaagtgatgtacggcgcgggtctgcgtctttctgagctggtggggctggatattaaacacctcgacctggagtctggtgaagtgtgggttatggggaaaggcagcaaagagcgccgcctgccgattggtcgcaacgctgtggcgtggattgagcactggcttgatttgcgcgacctgtttggtagcgaagacgacgcgctttttctgagcaaactgggcaagcgtatctccgcgcgtaatgtgcagaaacgctttgccgaatggggcataaaacaagggctgaataatcacgttcatccgcataaattacgtcacagcttcgccacgcatatgctggagagcagcggcgatcttcgtggtgtgcaggagctgctgggtcatgccaacctctccaccacgcaaatctatactcatcttgattttcaacaccttgccagcgtgtacgatgcggcgcatccacgcgccaaacgggggaaataatgcgtttttaccggcctttggggcgcatcagcgcgctcacctttgacctggatgataccctttacgataaccgtccggtgattttgcgcaccgagcgagaggcgcttacctttgtgcaaaattatcatccggcgctgcgcagcttccagaatgaagatctgcaacgcctgcgccaggcggtacgggaagcggaacccgagatttatcacgacgtgacgcgctggcgttttcgtagcattgaacaagcgatgctcgacgccgggctgagtgccgaagaagccagtgcaggcgcacacgcagcaatgatcaactttgccaaatggcgcagccgaatcgacgtcccgcagcaaactcacgacaccttaaaacagctggcgaagaaatggccgctggtggcgatcaccaacggtaacgcccagccggagctgtttggtttgggggattattttgagtttgtgctgcgcgctggcccgcacgggcgcagtaaaccgttcagcgatatgtactttttggctgcggaaaaactcaacgtgccgatcggcgagatcttacatgttggggacgatctcaccactgacgtgggtggggcaattcgcagcggaatgcaggcttgttggatcagaccggaaaatggcgatctgatgcaaacctgggacagccgtttactgccgcatctggaaatttcccggttggcatctctgaccagcctgatataatcagcaaatctgtatatatacccagctttttggcggagggcgttgcgcttctccgcccaacctatttttacgcggcggtgccaatggacgtttcttacctgctcgacagccttaatgacaaacagcgcgaagcggtggccgcgccacgcagcaaccttctggtgctggcgggcgcgggcagtggtaagacgcgcgtactggtgcatcgtatcgcctggttgatgagcgtggaaaactgcagcccatacagcattatggcggtgacgtttaccaacaaagcggcggcggagatgcgtcatcgtatcgggcaactgatgggcacgagccagggcggtatgtgggtcggcaccttccacgggctggcgcaccgtttgctgcgtgcgcaccatatggacgccaatctgccgcaggatttccagatcctcgacagtgaagaccagctacgcctgcttaagcgtctgatcaaagccatgaacctcgacgagaagcagtggccgccgcggcaggcaatgtggtacatcaacagccagaaagatgaaggcctgcgtccgcatcatattcaaagctacggtaatccggtggagcagacctggcagaaggtgtatcaggcgtatcaggaagcgtgtgaccgcgcgggcctggtggacttcgccgagctgctgctgcgcgctcacgagttgtggcttaacaagccgcatatcctgcaacactaccgcgaacgttttaccaatatcctggtggacgaattccaggataccaacaacattcagtacgcgtggatccgcctgctggcgggcgacaccggcaaagtgatgatcgtcggtgatgacgaccagagtatctacggctggcgcggggcgcaggtggagaatattcagcgtttccttaatgatttccccggtgccgaaactattcgtctggagcaaaactaccgctctaccagcaatattctgagcgccgctaacgccctgattgaaaacaataacgggcgtctgggtaaaaaactgtggaccgatggcgcggacggtgagcctatttccctctattgcgcttttaacgaactcgatgaagcgcgttttgtggttaaccgcatcaaaacctggcaggacaacggcggagcgcttgccgagtgcgccattctctaccgcagcaacgcccagagccgggtgctcgaagaggcgttattgcaggccagtatgccgtaccgtatttacggcgggatgcgcttcttcgaacgccaggaaatcaaagatgcgctcagctatctgcgcctgattgccaaccgcaacgacgacgcggcctttgagcgtgtggtgaatacgccaacgcggggtattggtgaccggacgctggacgtggtacgtcagacaagccgcgatcgccagttaacactctggcaggcatgtcgtgagctgttgcaggaaaaagccctcgccgggcgagctgccagcgccttgcagcgatttatggaattaatcgacgccttagcgcaggaaactgccgatatgccgctgcatgtacagactgaccgggtaattaaagactccggcctgcgtaccatgtatgagcaggagaagggcgaaaaaggtcagacgcgtatcgaaaacttagaggaactggtgacggcaacgcgccagttcagctacaacgaagaagacgaagatttaatgccgctgcaggcgttcctctcccatgcggcactggaagcaggtgaagggcaggcggatacctggcaggatgcggtgcagttgatgacgctacacagcgcgaaaggcctggagttcccgcaggtgtttatcgttggtatggaagagggcatgttcccaagccagatgagcctggatgaaggcgggcgtctggaagaagaacgccgtctggcctacgttggcgtaacccgcgcgatgcagaaactgacgctgacctacgcggaaacccgccgtctgtatggtaaagaggtttaccatcgcccgagccgctttatcggcgagctgccggaagagtgtgtggaagaggtgcgcctgcgcgccacggtaagccgcccggtcagccatcagcggatgggtacgccgatggtcgagaacgacagcggctacaagctcggccagcgcgtacgccacgctaagtttggtgaaggcaccattgtcaatatggaaggcagcggtgagcatagccgtttgcaggtggcatttcagggccagggtattaaatggctggtggcggcatacgcccggctggagagcgtgtaacgttgccggatgcggtgctgcgcaccttatttggcctaaaaaatcattcagattcaataaattgcaacgtcatgtaggccggatagggcgtttacgccgcatccggcatctgcgccatcttcagtatctgacacaaaactatcgttttaacctttccgctcgacggaaatcatggtgacaaaaggatagcgttgccacgggattgccccgcctttcatatacatatgactaatcgtgccatcaagataaagcagctgctcaacgttcagtttcgctttggcataacaggcaaaatcataaaaatttgttgcctgctggctcaacaaaaacacggcgttcccatgtttattaatcccaacaccgttacgaattttgctactggcgacgttgggatgaatacgcggattaattacaccgttttccatcaacattggcccactctgcaccgcaaactgaatctctttactggttttgaaggcatccagacgaacgatgccgactttatctcccgcgacataaaacacgccgccaggacggataaagaaattcccttcaccactagcgagatttaacgccaccttctgctgaccgttttcgatgtacaaaccgagcggcgcatagctttcatcatagatgccgccgttcatcgccatctgcacctgaccctgactattaatatccgccagcagagcatgtaacgttccccacgcttcgccattggctttttgccagtacattttcacccgctctgtttgaggattaacggtatacgcctgtacggtcagcgtcggatcactgagtgcgcaatcatcagcggcaacagcaaacaagggaagtaaggtgagggcgagaaaaatccgtttgagattcaaggtgatcattcctttaccaatgagtagctgatgcgccattataggtcctggatgtgggatttttttatcctgttagcgaccttgacgagtaccaaaaagcgcgaagttcaactattgttctgtggtgttctgttgcgtgttgacggcaaaattttgctggcgtaacatgcgcgcacgatcactctaagaggacattcgccttggacacacccagtagatactggctcactatcctgtcatccaggatcaactcctaaggctatccctttttgctgatagccttagcggttgtcagcgacctcaatttttcccgtcgcgctgagtcaggctgtttaatggtctgaaacccaatttgtttctgtgtgcccaccgaactgtccgatattttaagcattgggagtcccggtcatgctgagcgcatttcaactggaaaataaccgactgacccggctggaagtcgaagagagtcaaccccttgtaaatgcagtatggattgatcttgtcgaaccggacgacgacgagcgactgcgcgtacaatctgaacttggccagagcctggcaacccgcccggaactggaagacatcgaagcaagcgcacgtttctttgaagacgacgacggcctgcatattcactccttcttcttctttgaagatgcggaagatcacgccggtaactccactgtggcatttaccatccgtgatggtcgtctgtttactctgcgtgagcgtgaactgcccgcttttcgtctgtatcgtatgcgtgcccgtagccagagcatggtagacggtaacgcctacgagttgctgctggatctgttcgaaaccaaaatcgaacagttggcagatgaaattgaaaatatctatagcgacctggagcagttgagccgggtgattatggaagggcatcagggcgatgagtacgacgaggcgctctccactctggcggaactggaagatatcggctggaaagttcgcctgtgtctgatggatacccagcgcgcgctcaacttcctggtgcgtaaagcgcgtttaccgggtgggcaactggagcaggcgcgtgaaatcctgcgagatatcgaatccctgctgccgcataacgaatccctgttccagaaggtgaacttcctgatgcaggcggcaatgggttttatcaacatcgagcagaaccgcatcatcaaaatcttcagcgtggtatccgtggtattcctgccgccgacgctcgttgcttccagctatggcatgaactttgagtttatgccagaactgaagtggagcttcggctaccctggcgcgattatctttatgatcctcgcgggcctggcaccgtatctgtactttaagcggaagaactggttgtaaaaaacgagagcggtggcttagtctggctaagccacctgttattcaaaggctccaggtatttaacccttttacctctttctcatagaaccatttgttcgtgttaacagcaacataggctgctacggcaattcccagaatgttaacgccaattagtgcaccaacaaatagagatagaataccaagtaatagaactataattgcttttttccataaccccaggacaaataaatatatccaggaacagaagaaagcaatgaaattcatttgaatagttaagcgttgtcttacttttaatgctttaaatgctgctttatattctggtgttgccccccagaatccaggaaaaccatgttgatcataaaaattaaatcggtatttccatttttcacttaaactaccatcgttcatatattccttactcataaatactccataattattgtttactactatcagtaggtgcaagcattagcatactgaaagtggaaaaataacaaatcaaaaaaatcatgctaccattgccactacaggcaaaatcttcggctatcattgtgatgatagagatgatatatactgctaatgtaccaaaaacataagtttttatatagatgaaaccactatcacggagtcgctggcaattcatgttgatgacgagataatggagtacgatggtagagactataacaagaaagcctgcttctccatcgttaaaaaagataataagaaaggcaaaaatgaaatttattaaaataaaactaaatatataacgacgtctggaaatcttaccgttagatgttgggataaatatacgtaacataaattttacatccttgtatgagtctccggtcagcatggcaatatgcccactctcatgcaagagtcggcatattttttcagaatatatttattttttatttggacgttctacgctgcgtataaatcgcatccatcacaaaaattgccagcgccacccaaataaaggcgaaagtcaccatcttatcggcacccggtttttcaccataaaacgtcacagccagcaggaacatcagcgtcgggccaatgtactggaaaaagcctaacgtactgagacgcaagcgcgtggcagcggcggtaaaacacaacagcggtacggtagtgacaataccggcggcgatcagcagtaaattcaggctcatcgggttttgccccatatggctggtactgctgtcggcaatagcaaacaggtaaattgccgccacgggcagcagccacatggtttcgattaacatgccggtttgcgcttcaacggcaatcttcttgcgtaccagaccgtagaaggcaaaactaaatgccagtcccagcgcgataataggtaggctaccaaaagtccacagctggactaacacgccacatatcgccagaatcaccgccagccattgcatccggcggaatcgctcgccgaggaaaatcatccccagcacaatgttcaccagcgggttaataaagtaaccaaggctcgcttccagcatatggtgattgttcaccgcccagataaacagtagccagttgccaccaatcagcacggcagagactgccagcataaaaattttctgtggcgtctgaatcagcgtttttaaataggaccactggcggcaaatgctcatcagcaccaccataaagaaaaagctccagatcacgcgatgcgtcaggatttcatcggcgggcacgtagtaaatcaacttgaagtacgctggcgctataccccaaataaaataagcggcaagagcgagtaatacgccctgccgcgtttgttttgcatccatcgggaatactcatttttaattggtaacagcagtttacctgcttttatgtcttcaacctaccatataggtggcggtggcactggcaatataaagctgttcttcattgtgtaattcaacgcgggcgacggcgactttattgcctgcacgcaacaggctactagtagcagtaaaacgctcgcccctgcctgggcgcagataatcaacgcgaagatcaatggtccccatccggcttagccgctggcgtagttcatcttcactgatggtttcgtggcgggttaaggtacttcccacgcacaccagaccggcggcgacatccagcgcgctcgcaatgaccccgccgtgcaaaatgctttgcgcccagttgcccaccatcattggctgatttttaaaggccagctgtgcgaactctttttcgtaacgctccagttccatccccaatgcgcggttaaatggcatgtgataaacaaacatctcacccactaatttcagggcttgttcagcggtcagtacggcagacatatcatccttacacttcattggttaatgaaatgttgattttatgcttctttgttgttggtttctactttaggaagggataactaacggctatggagttaagtatgtaaaatagcccgcagaaaaatattcaccttatcaataattcgttacggagaacacgaccgatgcggactctgcagggctggttgttgccggtgtttatgttgcctatggcagtatatgcacaagaggcaacggtgaaagaggtgcatgacgcgccagcggtgcgtggcagtattatcgccaatatgctgcaggagcatgacaatccgttcacgctctatccttatgacaccaactacctcatttacacccaaaccagcgatctgaataaagaagcgattgccagttacgactgggcggaaaatgcgcgtaaggatgaagtaaagtttcagttgagcctggcatttccgctgtggcgtgggattttaggcccgaacagcgtgttgggtgcgtcttatacgcaaaaatcctggtggcaactgtccaatagcgaagagtctagtccgtttcgtgaaaccaactacgaaccgcaattgttcctcggttttgccaccgattaccgttttgcaggttggacgctgcgcgatgtggagatggggtataaccacgactctaacgggcgttccgacccgacctcccgcagctggaaccgcctttatactcgcctgatggcagaaaacggtaactggctggtagaagtgaagccgtggtatgtggtgggtaatactgacgataacccggatatcaccaaatatatgggttactaccagcttaaaatcggctatcacctcggtgatgcggtgctcagtgcgaaaggacagtacaactggaacaccggctacggcggcgcggagttaggcttaagttacccgatcaccaaacatgtgcgcctttatactcaggtttacagcggctatggcgaaagcctcatcgactataacttcaaccagacccgtgtcggtgtgggggttatgctaaacgatttgttttgatgaacggttgagtggttggcaaatctggaatccagcatccaggattaccctctcagagactaaaagcattgcagtttctcgcgcaggcgctgaaaatagcgcctgtttttatttcaggcaatcggggtgaatgtggcgcaggcggaagtgttgaatctggagtccggagctaaacaggttttacaagaaacctttggctaccaacagtttcgccccggccaggaagaaattatcgacactgtgctttccggccgcgattgcctcgtcgtcatgcccactggtggcggaaaatccctttgctatcaaatccctgccttattgctaaacggccttaccgtggttgttagtccgctgattagcttgatgaaagatcaggtggatcaactgcaagccaacggcgtggcggcggcgtgccttaacagcacgcaaacccgcgaacagcaacttgaagtgatgacaggctgccgcaccgggcaaattcgtctgctttatatcgccccggaacgcctgatgctggataactttcttgagcatctggcgcactggaatccggtgttattagccgttgatgaagcgcactgtatctcccaatggggccacgatttccgcccggaatatgccgcgctcggtcagttgcgccagcggttcccgacgctgccgtttatggcgctgaccgccacagccgacgacaccacgcgccaggatatcgtgcgcctgctggggctgaacgatccgctgattcaaatcagcagttttgaccgtccgaatattcgctacatgctgatggagaagttcaaaccgctcgatcagttgatgcgctacgtgcaggaacagcgcggtaagagtggcattatctactgcaacagccgcgcgaaagtagaagacaccgctgcgcgcctgcaaagcaagggaattagcgcggcggcctatcatgccgggctggaaaataatgttcgcgccgatgtgcaggaaaaattccagcgcgatgacctgcaaattgtggtggcgacggtggcgttcggcatgggcatcaataaaccaaacgttcgcttcgtggtccactttgatattccgcgcaatatcgaatcctattatcaggaaaccggacgcgccgggcgtgatggcctgcccgcggaagcgatgctgttttacgatccggctgatatggcgtggctgcgccgttgtctggaagagaagccgcaggggcagttgcaggatatcgagcgccacaaactcaatgcgatgggcgcgtttgccgaagcgcaaacttgccgtcgtctggtattgctgaactattttggcgaagggcgtcaggagccgtgcgggaactgcgatatctgcctcgatccgccgaaacagtacgacggtagtaccgatgctcagattgccctttccaccattggtcgtgtgaatcagcggtttgggatgggttatgtggtggaagtgattcgtggtgctaataaccagcgtatccgcgactatggtcatgacaaactgaaagtctatggcatgggccgtgataaaagccatgaacattgggtgagcgtgatccgccagctgattcacctcggcctggtgacgcaaaatattgcccagcattctgccctacaactgacagaggccgcgcgcccggtgctgcgcggcgaatcctctttgcaacttgccgtgccgcgtatcgtggcgctcaaaccgaaagcgatgcagaaaagcttcggcggcaactatgatcgcaaactgttcgccaaattacgcaaactgcgtaaaagcatagccgatgaaagtaatgtcccgccgtacgtggtgtttaacgacgcaaccttgattgagatggctgaacagatgccgatcaccgccagcgaaatgctcagcgttaacggcgttgggatgcgcaagctggaacgctttggcaaaccgtttatggcgctgattcgtgcgcatgttgatggcgatgacgaagagtaatcagcagcataaaaaagtgccagtatgaagactccgtaaacgtttcccccgcgagtcaaatgtatgttgatgttatttctcaccgtcgccatggtgcacattgtggcgcttatgagccccggtcccgatttcttttttgtctctcagaccgctgtcagtcgttcccgtaaagaagcgatgatgggcgtgctgggcattacctgcggcgtaatggtttgggctgggattgcgctgcttggcctgcatttgattatcgaaaaaatggcctggctgcatacgctgattatggtgggcggtggcctgtatctctgctggatgggttaccagatgctacgtggtgcactgaaaaaagaggcggtttctgcacctgcgccacaggtcgagctggcgaaaagtgggcgcagtttcctgaaaggtttactgaccaatctcgctaatccgaaagcgattatctactttggcagcgtgttcagtttgtttgtcggtgataacgttggcactaccgcgcgctggggcatttttgcgctgatcattgtcgaaacgctggcgtggtttaccgtcgttgccagcctgtttgccctgccgcaaatgcgccgtggttatcaacgtctggcgaagtggattgatggttttgccggggcgttatttgccggatttggcattcatttgattattagccggtgatgccagacgcgtcttcagagtaagtcggataaggcgtttacgccgcatccgacattatttttcacgcatgcctcgcgcttgctaacagcgctcccaccagcataaacaagctgccgaaaatcttattcagcgccttcatctgctttggtcctttaatccatagagcaatccgttgagcaagggtggcgtaaccgatcatcacaataatatcgaccacaatagtggtgacgccgagcacgatatactgcatcagttgcggctgttgcggcatgatgaattgcggaaatagcgccgccagaaacacaatacttttgggattggtgagattcacaaaaactgcgcgctggaacaaatgtcgacggctttgagtagaggccaggcttttaaggtcaattgcaccagcggcgcgccactgctggattcccagccaaatcaagtaagccgcgcctgcccacttcaacacttcaaacgcaatcacactgcgggaaaatagcgtccccaaccccacgccaaccagcacaatatgaatcgccagtccggtctgaagcccagcaatagacgccaccgcgccgcgataaccgtggttgaggctggtggtcatagtgttgattgcaccagagcctgggctcaggcttaaaatgatgcttgtcagcaggtaggcaaaccaccattctaaggtcatgatgaactcccggtgtgtctatttttgtgccacaatacgctactgtcgcagcgttgtgtcaggcacgctaaaaaaaacgattttacgtggtttaagaggcagattacccgatgtttcagcagcaaaaagactgggaaacaagagaaaacgcgtttgctgcttttaccatgggaccgctgactgatttctggcgtcagcgtgatgaagcagagtttactggtgtggatgacattccggtgcgctttgtccgttttcgcgcacagcaccatgaccgggtggtagtcatctgcccggggcgtattgagagctacgtaaaatatgcggaactggcctatgacctgttccatttggggtttgatgtcttaatcatcgaccatcgcgggcagggacgttccggtcgcctgttagccgatccgcatctcgggcatgttaatcgctttaatgattatgttgatgatctggcggcattctggcagcaggaggttcagcccggtccgtggcgtaaacgctatatactggcacatagcatgggcggtgcgatctccacattatttctgcaacgccatccaggtgtatgtgacgccattgcgctaactgcgccaatgtttgggatcgtgattcgtatgccgagttttatggcacggcagatcctcaactgggccgaagcgcatccacgtttccgtgatggctatgcaataggcaccgggcgctggcgcgcgttgccgtttgctatcaacgtactgacccacagcagacagcgatatcgacgtaacttacgcttctatgctgatgacccaacgattcgcgtcggtgggccgacctaccattgggtacgcgaaagtattctggctggcgaacaggtgttagccggtgcgggtgatgacgccacgccaacgcttctcttgcaggctgaagaggaacgcgtggtggataaccgcatgcatgaccgtttttgtgaactccgcaccgccgcgggccatcctgtcgaaggaggacggccgttggtaattaaaggtgcttaccatgagatcctttttgaaaaggacgcaatgcgcagtgtcgcgctccacgccatcgttgattttttcaacaggcataacagtcccagcggaaaccgctctacagaggtttaaatttcttatgtaccaggttgttgcgtctgatttagatggcacgttactttctcccgaccatacgttatccccttacgccaaagaaactctgaagctgctcaccgcgcgcggcatcaactttgtgtttgcgaccggtcgtcaccacgttgatgtggggcaaattcgcgataatctggagattaagtcttacatgattacctccaatggtgcgcgcgttcacgatctggatggtaatctgatttttgctcataacctggatcgcgacattgccagcgatctgtttggcgtagtcaacgacaatccggacatcattactaacgtttatcgcgacgacgaatggtttatgaatcgccatcgcccggaagagatgcgcttttttaaagaagcggtgttccaatatgcgctgtatgagcctggattactggagccggaaggcgtcagcaaagtgttcttcacctgcgattcccatgaacaactgctgccgctggagcaggcgattaacgctcgttggggcgatcgcgtcaacgtcagtttctctaccttaacctgtctggaagtgatggcgggcggcgttagtaaaggccatgcgctggaagcggtggcgaagaaactgggctacagcctgaaggattgtattgcgtttggtgacgggatgaacgacgccgaaatgctgagcatggcggggaaaggctgcattatgggcagtgcgcaccagcgtctgaaagaccttcatcccgagctggaagtgattggtactaatgccgacgacgcggtgccgcattatctgcgtaaactctatttaagctaatcgttctttatttggtcagttgtcaacctgatacttcgctacaatggatacccgttaatcaaagagttttccattgtggcgctacttatcatcaccacgattctgtgggccttctcctttagcttttatggcgagtaccttgcggggcacgtcgatagctattttgcggtgctggtgcgcgttggcctggcggcactcgtttttctgccgtttctgcgtacccgtggcaatagcctgaaaacggtcggcctgtatatgctggtgggcgcgatgcagcttggcgtgatgtatatgctgagtttccgcgcttatctctacctgacggtttccgagctgctgctgttcaccgtgctgacgccgctctacatcacgctgatttatgacatcatgagtaagcgccgtctgcgctggggctatgcctttagcgccttgctggcggtgattggtgccgggattattcgctatgatcaggtcaccgaccatttctggactggcttgctgctggtgcaactctccaatatcacttttgccattggcatggtgggttacaaacgcctgatggaaactcgcccgatgccacagcataacgcctttgcgtggttctatcttggcgcgtttctggtggcagtgattgcatggttcttgctgggaaatgcgcagaaaatgccgcaaaccacgctgcaatggggcattctggtgtttcttggcgtggtggcttccgggattggctactttatgtggaactacggcgcgacgcaggtggacgccggaacgctgggcattatgaataatatgcacgttccggcagggctgctggtaaacctggctatctggcaccaacagccgcactggccaacgtttattacaggcgcgctggtgatcctggccagtctgtgggtgcatcgtaagtgggtcgctccgcgctctagtcaaacggcagatgatcgcaggcgtgattgcgcgctgagcgaataattacaggcgcgctggacttcctggcctcactgtgggtgcatcgtaagtgggtcgctccgcgctcttcacaaacggcagatgatcgcaggcgtgattgcgcgcactgcgaataaacgcttccgtaactggctgacgctgctcgccatcgcgcacggcggcgtacagtcggctccacaagccttcgcccagggttttggtcaccaccagaccctggcgctcaaaactctctactacccaatgcggtagcgcggcaatacccatccgcgcggcaaccatctgaatcaacaataaggtgttatcgacgcttttcagactcgggctgacgcctgccggctgaagaaaatgccgccagacatccagtcgactacgctgcaccggataaattaatagcgtctcgctggcgagatcttccggtgtaattcgcgttttcgccgccagtggatggtcaggtgctaacaccagacgcacttcatagtcgaacatcgggctataatgcaggccactgcgcggcagaatatcggacgtcattaccagatccagctctccctgttgcaaggcgggctgcgggtcaaatgtcacgccgcttttaaaatccatctctacctgcggccagttcttatggaaattttctaacgcgggtgtcagccactgaatacagctatggcactcaatggcaatgcgcagacgcgtctgctgcggttcattgcaggcttgcagggcctggctaatttgcggcagtacctggtttgccagttgcaacaggatttctccctgcggtgtaaagcgtagcggctggctcttacgcacaaatagccggaagccaaggcgttgttccagatcgctaaactggtgagacagggcggattgcgtctgatgcaacgtcgccgcagcggctgcgaggctgccgcagttccgcaacgcttgtagcgttttcaggtgttttacttcgatcatgaaagtccttcacttcggcatgaataatttgcgcttgaggaatatacagtaaccgccaattatggatgtgtaaacatctggacggctaaaatccttcgtcttttaaatttatggtgcgttggctgcgtttctccaccccggtcacttacttcagtaagctcccggggatgaataaacttgccgccttccctaaattcaaaatccataggatttacatataattagaggaagaaaaaatgacaatattgaatcacaccctcggtttccctcgcgttggcctgcgtcgcgagctgaaaaaagcgcaagaaagttattgggcggggaactccacgcgtgaagaactgctggcggtagggcgtgaattgcgtgctcgtcactgggatcaacaaaagcaagcgggtatcgacctgctgccggtgggcgattttgcctggtacgatcatgtactgaccaccagtctgctgctgggtaacgttccggcgcgtcatcagaacaaagatggtagcgtagatatcgacaccctgttccgtattggtcgtggacgtgcgccgactggcgaacctgcggcggcagcggaaatgaccaaatggtttaacaccaactatcactacatggtgccggagttcgttaaaggccaacagttcaaactgacctggacgcagctgctggacgaagtggacgaggcgctggcgctgggccacaaggtgaaacctgtgctgctggggccggttacctggctgtggctggggaaagtgaaaggtgaacaatttgaccgcctgagcctgctgaacgacattctgccggtttatcagcaagtgctggcagaactggcgaaacgcggcatcgagtgggtacagattgatgaacccgcgctggtactggaactaccacaggcgtggctggacgcatacaaacccgcttacgacgcgctccagggacaggtgaaactgctgctgaccacctattttgaaggcgtaacgccaaatctcgacacgattactgcgctgcctgttcagggtctgcatgttgacctcgtacatggtaaagatgacgttgctgaactgcacaagcgcctgccttctgactggttgctgtctgcgggtctgatcaatggtcgtaacgtctggcgcgccgatcttaccgagaaatatgcgcaaattaaggacattgtcggcaaacgtgatttgtgggtggcatcttcctgcagcttgctgcacagccccatcgacctgagcgtggaaacgcgtcttgatgcagaagtgaaaagctggtttgccttcgccctacaaaaatgccatgaactggcactgctgcgcgatgcgctgaacagtggtgacacggcagctctggcagagtggagcgccccgattcaggcacgtcgtcactctacccgcgtacataatccggcggtagaaaagcgtctggcggcgatcaccgcccaggacagccagcgtgcgaatgtctatgaagtgcgtgctgaagcccagcgtgcgcgttttaaactgccagcgtggccgaccaccacgattggttccttcccgcaaaccacggaaattcgtaccctgcgtctggatttcaaaaagggcaatctcgacgccaacaactaccgcacgggcattgcggaacatatcaagcaggccattgttgagcaggaacgtttgggactggatgtgctggtacatggcgaggccgagcgtaatgacatggtggaatactttggcgagcacctcgacggatttgtctttacgcaaaacggttgggtacagagctacggttcccgctgcgtgaagccaccgattgtcattggtgacattagccgcccggcaccgattaccgtggagtgggcgaagtatgcgcaaagcctgaccgacaaaccggtgaaagggatgctgacggggccggtgaccatactctgctggagcttcccgcgtgaagatgtcagccgtgaaaccatcgccaaacagattgcgctggcgctgcgtgatgaagtggccgatctggaagccgctggaattggcatcatccagattgacgaaccggcgctgcgcgaaggtttaccgctgcgtcgtagcgactgggatgcgtatctccagtggggcgtagaggccttccgtatcaacgccgccgtggcgaaagatgacacacaaatccacactcacatgtgttattgcgagttcaacgacatcatggatagcattgcggcgctggacgcagacgtcatcaccatcgaaaccagccgttccgacatggagttgctggagagctttgaagagtttgattatccaaatgaaatcggtcctggcgtctatgacattcacagcccaaacgtaccgagcgtggaatggattgaagccttgctgaagaaagcggcaaaacgcattccggcagagcgcctgtgggtcaacccggactgtggcctgaaaacgcgcggctggccagaaacccgcgcggcactggcgaacatggtgcaggcggcgcagaacttgcgtcgggggtaaaatccaaaccgggtggtaataccacccggtcttttctcattacaggctcttcttcccaccatactgcttaaaccattccagcatacgctgccagccatcttctgcagatgcggcatgatagctcgggcgataatcagcgttgaatgcatgcccggcgtccgggtacacgataatctctgctttcgcattagcagcccgcagcgcctggcgcatggtttcaacgctctcctgcggaatgctgttatcctgaccaccatataagccgagaatcggcgcgttaagatcggttgcgatatcaacaggttgtttcggactattcaggctcttgtcgcccgtcagtttgccgtaccacgccactgcggcttttagctgtggattatgcgcggcatacagccaggtgatacgtccaccccagcagaatccggtgatcattaaacgatgaacatcgccgccgttgcgggaagcccaactggcgacatgatcgagatcggccagcacctggctgtcaggcacttttgctaccagaccgctaagcaacgtggggatatcggcaaaatcattcggatcgccttcgcggaagtaaagttcaggtgcgatagccagatacccctccagcgccagacggcgacaaatgtcgcggatatgttcatgcacgccaaaaatttcctgcactacaatgaccactggcagtgggccatcgctttgctttggtctggcatggtaagcaggcatgttatccccttgactagggatagaggtgaagcccgccacaatcgcgtcgtccggggtctgaacgatggtgctagcgagagggcttgcagcaggtgcaaatccagattgttgtgttgttgccatggtattctccgtacccttataaaaatgttgcgcaatgttaactatagtcagcatgcaacaaatcacattgcctgaatcggctcatcttttatgcagtcctgcagaatgaagggtgatttatgtgatttgcatcacttttggtgggtaaatttatgcaacgcatttgcgtcatggtgatgagtatcacgaaaaaatgttaaacccttcggtaaagtgtctttttgcttcttctgactaaaccgattcacagaggagttgtatatgtccaagtctgatgtttttcatctcggcctcactaaaaacgatttacaaggggctacgcttgccatcgtccctggcgacccggatcgtgtggaaaagatcgccgcgctgatggataagccggttaagctggcatctcaccgcgaattcactacctggcgtgcagagctggatggtaaacctgttatcgtctgctctaccggtatcggcggcccgtctacctctattgctgttgaagagctggcacagctgggcattcgcaccttcctgcgtatcggtacaacgggcgctattcagccgcatattaatgtgggtgatgtcctggttaccacggcgtctgtccgtctggatggcgcgagcctgcacttcgcaccgctggaattcccggctgtcgctgatttcgaatgtacgactgcgctggttgaagctgcgaaatccattggcgcgacaactcacgttggcgtgacagcttcttctgataccttctacccaggtcaggaacgttacgatacttactctggtcgcgtagttcgtcactttaaaggttctatggaagagtggcaggcgatgggcgtaatgaactatgaaatggaatctgcaaccctgctgaccatgtgtgcaagtcagggcctgcgtgccggtatggtagcgggtgttatcgttaaccgcacccagcaagagatcccgaatgctgagacgatgaaacaaaccgaaagccatgcggtgaaaatcgtggtggaagcggcgcgtcgtctgctgtaattctcttctcctgtctgaaggccgacgcgttcggccttttgtatttttgcgtagcgcctcgcaggaaatgcctttccaactggacgtttgtacagcacaattctattttgtgcgggtaagttgttgcgtcaggaggcgttgtggatttcagtatcatggtttacgcagttattgcgttggtgggtgtggcaattggctggctgtttgccagttatcaacatgcgcagcaaaaagccgagcaattagctgaacgtgaagagatggtcgcggagttaagcgcggcaaaacaacaaattacccaaagcgagcactggcgtgcagagtgcgagttactcaataacgaagtgcgcagcctgcaaagtattaacacctctctggaggccgatctgcgtgaagtaaccacgcggatggaagccgcacagcaacatgctgacgataaaattcgccagatgattaacagcgagcagcgcctcagtgagcagtttgaaaacctcgccaaccgtatttttgagcacagcaatcgccgggttgatgagcaaaaccgtcagagtctgaacagcctgttgagcccgctacgtgaacaactggacggtttccgccgtcaggttcaggacagcttcggtaaagaagcacaagaacgccataccctgacccacgaaattcgcaatctccagcaactcaacgcgcaaatggcccaggaagcgatcaacctgacgcgcgcgctgaaaggcgacaataaaacccagggcaactggggcgaggtagtattgacgcgggtgttggaggcttccggtctgcgtgaagggtatgaatatgaaacccaggtcagcatcgaaaatgacgcccgcagccggatgcagccggatgtcatcgtgcgcctgccgcagggaaaagatgtggtgatcgacgccaaaatgacgctggtcgcctatgaacgctattttaacgccgaagacgactacacccgcgaaagcgcgctacaggaacatatcgcgagcgtgcgtaaccatatccgtttgctgggacgcaaagattatcaacagctgccggggctgcgaactctggattacgtgctgatgtttattcccgttgaacccgcttttttactggcgcttgaccgccagccggagctgatcaccgaagcgttgaaaaacaacatcatgctggttagcccgactacgctgctggtggcgctgcgcactatcgccaacctgtggcgttatgagcatcaaagccgcaacgcccagcaaatcgccgatcgtgccagcaagctgtacgacaagatgcgtttgttcatcgatgacatgtccgcgattggtcaaagtctcgacaaagcgcaggataattatcggcaggcaatgaaaaaactctctagtgggcgcggaaatgtgctggcgcaggcagaagcgtttcgcggtttaggagtagaaattaaacgcgagattaatccggatttggctgaacaggcggtgagccaggatgaagagtatcgacttcggagcgttccggagcagccgaatgatgaagcttatcaacgcgatgatgaatataatcagcagagccgctaacccattgggagtagttaagccgggtagaaatctagggcatcgacgcccaatctgttacacttctggaacaattttttgatgagcaggcattgagatggtggataagagtcaagaaacgacgcactttggttttcagaccgtcgcgaaggaacaaaaagcggatatggtcgcccacgttttccattccgtggcaagtaaatacgatgtcatgaatgatttgatgagttttggtattcatcgtttgtggaagcgattcacgattgattgcagcggcgtacgccgtgggcagaccgtgctggatctggctggtggcaccggcgacctgacagcgaaattctcccgcctggtcggagaaactggcaaagtggtccttgctgatatcaatgaatccatgctcaaaatgggccgcgagaagctgcgtaatatcggtgtgattggcaacgttgagtatgttcaggcgaacgctgaggcgctgccgttcccggataacacctttgattgcatcaccattagctttggtctgcgtaacgtcaccgacaaagataaagcactgcgtagtatgtatcgcgtgctgaaacccggcggccgcctgctggtgcttgagttcagcaagccaattatcgagccgctgagcaaagcctatgatgcatactccttccatgtgctgccgcgtattggcagtctggtcgcgaacgacgccgacagctaccgttatctggcagaatccatccgtatgcatcccgatcaggataccctgaaagccatgatgcaggatgccggattcgaaagtgtcgactactacaatctgacggcaggggttgtggcgctgcatcgtggttataagttctgacaggagaccggaaatgccttttaaacctttagtgacggcaggaattgaaagtctgctcaacaccttcctgtatcgcagtcccgcgctgaaaacggcccgcagccgtctgctgggtaaagtattgcgcgtggaggtaaaaggctttagcacgagtttgattctggtgttcagcgaacgccaggttgatgtactgggcgaatgggcaggcgatgctgactgcaccgttatcgcctacgccagtgtgttgccgaaacttcgcgatcgccagcagcttaccgcactgattcgcagtggtgagctggaagtgcagggcgatattcaggtggtgcaaaacttcgttgcgctggcagatctggcagagttcgaccctgcggaactgctggccccttataccggtgatatcgccgctgaaggaatcagcaaagccatgcgcggaggcgcaaagttcctgcatcacggcattaagcgccagcaacgttatgtggcggaagccattactgaagagtggcgtatggcacccggtccgcttgaagtggcctggtttgcggaagagacggctgccgtcgagcgtgctgttgatgccctgaccaaacggctggaaaaactggaggctaaatgacgccaggtgaagtacggcgcctatatttcatcattcgcacttttttaagctacggacttgatgaactgatccccaaaatgcgtatcaccctgccgctacggctatggcgatacagtttattctggatgccaaatcggcataaagacaaacttttaggtgagcgactacgactggccctgcaagaactggggccggtttggatcaagttcgggcaaatgttaagtacccgccgcgatctttttccaccgcatattgccgatcagctggcgttattgcaggacaaagttgctccgtttgatggcaagctggcgaagcagcagattgaagctgcaatgggcggcttgccggtagaagcgtggtttgacgattttgaaatcaagccgctggcttctgcttctatcgcccaggttcataccgcgcgattgaaaagcaatggtaaagaggtggtgattaaagtcatccgcccggatattttgccggttattaaagcggatctgaaacttatctaccgtctggctcgctgggtgccgcgtttgctgccggatggtcgccgtctgcgcccaaccgaagtggtgcgcgagtacgaaaagacattgattgatgaactgaatttgctgcgggaatctgccaacgccattcagcttcggcgcaattttgaagacagcccgatgctctacatcccggaagtttaccctgactattgtagtgaagggatgatggtgatggagcgcatttacggcattccggtgtctgatgttgcggcgctggagaaaaacggcactaacatgaaattgctggcggaacgcggcgtgcaggtgttcttcactcaggtctttcgcgacagctttttccatgccgatatgcaccctggcaacatcttcgtaagctatgaacacccggaaaacccgaaatatatcggcattgattgcgggattgttggcagcctaaacaaagaagataaacgctatctggcagaaaactttatcgccttctttaatcgcgactatcgcaaagtggcagagctacacgtcgattctggctgggtgccaccagataccaacgttgaagagttcgaatttgccattcgtacggtctgtgaacctatctttgagaaaccgctggccgaaattagctttggacatgtactgttaaatctgtttaatacggcgcgtcgcttcaatatggaagtgcagccgcaactggtgttactccagaaaaccctgctctacgtcgaaggggtaggacgccagctttatccgcaactcgatttatggaaaacggcgaagcctttcctggagagctggattaaagatcaggtcggtattcctgcgctggtgagagcatttaaagaaaaagcgccgttctgggtcgaaaaaatgccagaactgcctgaattggtttacgacagtttgcgccagggcaagtatttacagcacagtgttgataagattgcccgcgagcttcagagtaatcatgtacgtcagggacaaagccgttattttctcggaattggcgctacgttagtattaagtggcacattcttgttggtcagccgacctgaatgggggctgatgcccggctggttaatggcaggtggtctgatcgcctggtttgtcggttggcgcaaaacacgctgattttttcatcgctcaaggcgggccgtgtaacgtataatgcggctttgtttaatcatcatctaccacagaggaacatgtatgggtggtatcagtatttggcagttattgattattgccgtcatcgttgtactgctttttggcaccaaaaagctcggctccatcggttccgatcttggtgcgagcatcaaaggctttaaaaaagcaatgagcgatgatgaaccaaagcaggataaaaccagtcaggatgctgattttactgcgaaaactatcgccgataagcaggcggatacgaatcaggaacaggctaaaacagaagacgcgaagcgccacgataaagagcaggtgtaatccgtgtttgatatcggttttagcgaactgctattggtgttcatcatcggcctcgtcgttctggggccgcaacgactgcctgtggcggtaaaaacggtagcgggctggattcgcgcgttgcgtagtctggcgacaacggtgcagaacgaactgacccaggagttaaaactccaggagtttcaggacagtctgaaaaaggttgaaaaggcgagcctcactaacctgacgcccgaactgaaagcgagcatggatgaactacgccaggccgcggagagcatgaagcgttcctacgttgcaaacgatcctgaaaaggcgagcgatgaagcgcacaccatccataacccggtggtgaaagataatgaagctgcgcatgagggcgtaacgcctgccgctgcacaaacgcaggccagtagcccggaacagaagccagaaaccacgccagagccggtggtaaaacctgctgcggacgctgaaccgaaaaccgctgcaccttcccctagcagcagtgataaaccgtaaacatgtctgtagaagatactcaaccgcttatcacgcatctgattgagctgcgtaagcgtctgctgaactgcattatcgcggtgatcgtgatattcctgtgtctggtctatttcgccaatgacatctatcacctggtatccgcgccattgatcaagcagttgccgcaaggtagtacgatgatcgccaccgacgtggccagcccgttctttacgccgatcaagctgacctttatggtgagcctgattctgagtgcgccggtgattctctatcaggtgtgggcatttatcgccccagcgctgtataagcatgaacgtcgcctggtggtgccgctgctggtttccagctctctgctgttttatatcggcatggcattcgcctactttgtggtctttccgctggcatttggcttccttgccaataccgcgccggaaggggtgcaggtatccaccgacatcgccagctatttaagcttcgttatggcgctgtttatggcgtttggtgtctcctttgaagtgccggtagcaattgtgctgctgtgctggatggggattaccagcccagaagacttacgcaaaaaacgcccgtatgtgctggttggtgcattcgttgtcgggatgttgctgacgccgccggatgtcttcagccaaacgctgttggcgatcccgatgtactgtctgtttgaaatcggtgtcttcttcagtcgcttttacgttggtaaagggcgaaatcgggaagaggaaaacgacgctgaagcagaaagcgaaaaaactgaagaataaattcaaccgcccgtcagggcggttgtcatatggagtacaggatgtttgatatcggcgttaatttgaccagtagccaatttgcgaaagaccgtgatgatgttgtagcgtgcgcttttgacgcgggagttaatgggctactcatcaccggcactaacctgcgtgaaagccagcaggcgcaaaagctggcgcgtcagtatagctcctgttggagtacggcgggcgtacatcctcacgacagcagccagtggcaagctgcgactgaagaagcgattattgagctggccgcgcagccagaagtggtggcgactggtgaatgtggtctcgactttaaccgcaactttagcacgccggaagagcaggaacgcgcttttgttgcccagctacgcattgccgcagatttaaacatgccggtatttatgcactgtcgcgatgcccacgagcggtttatgacattgctggagccgtggctggataaactgcctggtgcggttcttcattgctttaccggcacacgcgaagagatgcaggcgtgcgtggcgcatggaatttatatcggcattaccggttgggtttgcgatgaacgacgcggactggagctgcgggaacttttgccgttgattccggcggaaaaattactgatcgaaactgatgcgccgtatctgctccctcgcgatctcacgccaaagccaagttcccggcgcaacgagccagcccatctgccccatattttgcaacgtattgcgcactggcgtggagaagatgccgcatggctggctgccaccacggatgctaatgtcaaaacactgtttgggattgcgttttaaagtttgcggaactcggtattcttcacactgtgcttaatctctttattaataagattaagcaatagcatggagcgagcctcaccatcgggttcggtgaaaatggcctgaaagccttcgaacgcgccttcggtaataatcaccttatcacccggataaggggttgccggatcgacaatgtctttcggtttatatacgcttagctgatgaataaccgcgcttgggactatcgctgggctcgcgccaaagcgcacgaagtggctgacaccgcgggtcgcgttgatagtcgtggtatgaatcacttctgggtcaaattccacaaacaggtagttggggaacaatggctcactgactgcagtacgttttccacgcacgattttttccagggtgatcatcggtgccaggcaattcacagcctgtctttcgaggtgttcctgggcacgttgaagttgcccgcgcttgcagtacagtaaataccaggattgcataatgactcttatccgtttaatcggggcgcaaggatagcaaaagctttacgctaagttaattatattccccggtttgcgttataccgtcagagttcacgctaatttaacaaatttacagcatcgcaaagatgaacgccgtataatgggcgcagattaagaggctacaatggacgccatgaaatataacgatttacgcgacttcttgacgctgcttgaacagcagggtgagctaaaacgtatcacgctcccggtggatccgcatctggaaatcactgaaattgctgaccgcactttgcgtgccggtgggcctgcgctgttgttcgaaaaccctaaaggctacagtatgccggtgctgtgcaacctgttcggtacgccaaagcgcgtggcgatgggcatggggcaggaagatgttagcgcgctgcgtgaagttggtaaattattggcgtttctgaaagagccggagccgccaaaaggtttccgcgacctgtttgataaactgccgcagtttaagcaagtattgaacatgccgacaaagcggctgcgtggtgcgccctgccaacaaaaaatcgtctctggcgatgacgtcgatctcaatcgcattcccattatgacctgctggccggaagatgccgcgccgctgattacctgggggctgacagtgacgcgcggcccacataaagagcggcagaatctgggcatttatcgccagcagctgattggtaaaaacaaactgattatgcgctggctgagccatcgcggcggcgcgctggattatcaggagtggtgtgcggcgcatccgggcgaacgtttcccggtttctgtggcgctgggtgccgatcccgccacgattctcggtgcagtcactcccgttccggatacgcttagtgagtatgcgtttgccggattgctacgtggcaccaagaccgaagtggtgaagtgtatctccaatgatcttgaagtgcccgccagtgcggagattgtgctggaagggtatatcgaacaaggcgaaactgcgccggaagggccgtatggcgaccacaccggttactataatgaagtcgatagtttcccggtatttaccgtgacgcatattacccagcgtgaagatgcgatttaccattccacctataccgggcgtccgccagatgagcccgcggtgctgggtgtcgcactgaacgaagtgtttgtgccgattctgcaaaaacagttcccggaaattgtcgatttttacctgccgccggaaggctgctcttatcgcctggcggtagtgacaatcaaaaaacagtacgccggacacgcgaagcgcgtcatgatgggcgtctggagcttcttacgccagtttatgtacactaaatttgtgatcgtttgcgatgatgacgttaacgcacgcgactggaacgatgtgatttgggcgattaccacccgtatggacccggcgcgggatactgttctggtagaaaatacgcctattgattatctggattttgccagccctgtctccgggctgggtagtaaaatggggctggatgccacgaataaatggccgggggaaacccagcgtgaatggggacgtcccatcaaaaaagatccagatgttgtcgcgcatattgacgccatctgggatgaactggctatttttaacaacggtaaaagcgcctgatgcgcgtttgttttgccctatttatcgatccgacagagaaagcgcatgacaaccttaagctgtaaagtgaccagcgtagaagctatcacggataccgtatatcgtgtccgcatcgtgccagacgcggccttttcttttcgtgctggtcagtatttgatggtagtgatggatgagcgcgacaaacgtccgttcagtatggctagcacgccggatgaaaaagggtttatcgagctgcatattggcgcttctgaaatcaacctttacgcgaaagcagtcatggaccgcatcctcaaagatcatcaaatcgtggtcgacattccccacggagaagcgtggctgcgcgatgatgaagagcgtccgatgattttgattgcgggcggcaccgggttctcttatgcccgcagcattttgctgacagcgttggcgcgtaacccaaaccgtgatatcaccatttactggggcgggcgtgaagagcagcatctgtatgatctctgcgagcttgaggcgcttagcttgaagcatcctggtctgcaagtggtgccggtggttgaacaaccggaagcgggctggcgtgggcgtactggcaccgtgttaacggcggtattgcaggatcacggtacgctggcagagcatgatatctatattgccggacgttttgagatggcgaaaattgcccgcgatctgttttgcagtgagcgtaatgcgcgggaagatcgcctgtttggcgatgcgtttgcatttatctgagatataaaaaaacccgcccctgacaggcgggaagaacggcaactaaactgttattcagtggcatttagatctatgacgtatctggcaaaccatgcccgatgcgacgctgtcgcgtcttatcgtgcctacaaatagtccgaaccgtaggccggataaggcgtttacgccgcatccggcaattggtgcatgatgcctgatgcgacgctgtcgcgtcttatcgtgcctacaaatagtccgaaccgtaggccggataaggcgtttacgccgcatccggcaattggtgcatgatgcctgatgcgacgctggcgcgtcttatcaggcctacattggtgccggatcggtagaccggataaggcgttcacgccgcatccggcaagtggttaaacccgctcaaacaccgtcgcaataccctgacccagaccgatacacatcgtcgccagaccaaactgaacgtctttgcgttccatcagattcagcagcgtggtgctgatacgcgcaccggaacaacccagcggatgacccagcgcgatcgcgccaccgttgaggttgatcttctcgtcaatctgctcaattagtcccagatctttaatacatggcaggatctgcgcggcaaaggcttcgttcatttcaaacacgccgatatcgctggcagaaagccccgcttttttcagcgccagtttgctggccggaaccgggccgtaacccataatgcttgggtcacaaccaacgaccgccatgctacgcacacgagcgcgcggcttaagacctaattcatgggcgcggctttcactcatcaccagcatggcagctgcgccatcggaaagtgcagaagatgtgcccgccgttaccataccgtttactggatcaaacgccggacgcagcgtggcgagggcttccacggtggtttccgggcgaatcacttcgtcgtaattaaactgcttcaggacgccgtcggcatcgtgaccaccggtcgggatgatttcatttttaaatgcggcgctctgcgtggcggcccaggcgcgggcgtgactccgcgcggcaaaggcatcctgcatttcacggctgataccgtgcatacgcgccagcatttctgccgttaagcccatcatgcccgccgctttggcgacattgcggctcaggccggggtgaaaatcgacgccgtgactcatcggcacatggcccatatgctccacgccgccaaccagacatgcctgcgcatcgccagtcatgatcattcgtgctgcgtcatgcagtgcctgcatggaactaccacacaagcgattaacggtaaccgccgggacagagtgtggtacttctgccagcagcgccgcgttacgggcgatattaaaaccctgctccagcgtctgctgcacacaaccccagtaaatatcgtcgagggccgccgcttccagcgccgggttacgcgccagcaggctacgcattaaatgagcggagagatcttctgcacgcacgttacgaaaagcaccgcccttgctacggcccatcggggtgcgaattgcatcgacaatgacaacctgttccattgtgactccttaagccgttttcaggtcgccaaccggacgggctggctcaaccggaggatagtacggttcgttatgacgcgctttattacgcagaccttccggcacttcatacagcgggccgaggtgctgatattgctgtgccatatcgaggtattttgcgctaccgagggtgtccagccagcggaacgcgccgccgtggaacggagggaagcccaggccgtagaccagcgccatatccgcttccgccggagtggcgataatgccttcctccagacagcgcaccacttcgttgaccatcgggatcatcatgcgggcgataatctcttcttcgctgaagtcgcgcttcggctggctcacttctgccagcaggtcttcaacggcggcgtcttcttctttcttcggcttacctttgctgtcttctttataacgccagaaaccgaggccgttcttctgaccaaagcggttggcatcaaacagcgcgtcgatggcatcgcggtaatctttctgcatccgctgcgggaagcctgctgccatgacagcctgagcgtgatgcgcggtatcaatgcccacaacgtccagcagatatgccgggcccatcggccagccaaactgtttttccatcactttgtcgatcttgcggaaatccgcgccgtcgcgcagcagctggctgaaaccggcgaaatacgggaacagcacgcggttaacaaagaagccggggcagtcgttaaccacaatcggcgtcttgcccatcttgctcgcccaggcgacaactttcgcgatggtttcgtcggagcttttctcgccgcgaataatttctaccaacggcattcggtggaccgggttaaagaagtgcatcccgcagaagttttccgggcgttccagcgcgttggccagttcgctgataggaatggtactagtgttagacgccagcacggtatcctggcgtactttttgttcggtttctgccagtacggcttttttcactttcgggttttcaacaaccgcttctaccacaatatccacgcggtcaaatccggcgtagtcgagcgttgggtggattgtggagatcacgccagccagtttcagaccatcgatcttgccgcgctcaagctgcttgttcagcagtttcgcggcttcggtcatgccgagggttaagctcttgtcgttgatatctttcatgacaaccggcacgcctttccacgcagactggtaagcgatgccgccgcccataatgcctgcacccagcaccgcggcctgtttcggggtttcaacgtctttggtgagtttcttcgctttgccttttacatattgatcgttaaggaaaatgccgaccagtgcgcgggcttcgttggtatgcgccagcgggacaaaacttttgttttccaggtttaaggcttcttcacgaccaaaacgggccgcagcttcaatggtttttactgcggtgatgggggccggataatgtttccccgctgtttgtgcgaccatccctttagcgatggtgaagctcatggtggcttcaatcttgctcagttttagtggttccagcttcggctgacgttttgctttccagtcgaggtcgccgttaatggcctggcgtaaaaccgcctttgcgccttcaaccagtttttctgctttgactacgccatccaccagaccgattttcagcgcctgatccgcgccgacatctttaccggcggcaatgatttccagcgcactgtcagcgcccagcatacgtggcatacgtacagaaccgccaaagccaggcatgatgcccagtttggtttccggcagaccgatgcgcagatccggcgtcgccagacgataatcggtcgccagcacgcattcgcagccaccgcccagcgcatagccattgacggcagcaatggtcggcaccggcagatcttccaggcgattaaacacgctattggcaaagtgcagccactgacttaactgttcttcaggaacgaggaacagggacaaaaattcggtgatatcagcaccgacgataaaggctgctttgttgctacgcagcagcagcccttttagatcactttgctgttccagcacgccgatggcctcgccgaggctggcgacggtcgcagtgtcgagtttattaacactacctggggcatcaaataccagttcggcaatgccatcttccagccagtcaaggtacagggtgtcgcctttgtaaagcatgtcagtctcctgaatccgcaaggtgatctggtcgtaccagatgagtcgaagtgtgtattttgtgttaaaaatatgcaaacaaaagattaaagaaatgccgatctgatcacgctcggcagaaatcacgctctggatgaacgatgtgctaagatgcggagacttaaggtcaaaaaaacagaagggtaaaaaatggaaagtctggccagcctctataaaaatcatatagctaccttacaagaacggactcgcgatgcgctggcgcgcttcaagctggatgcgttacttattcactccggcgagctgttcaatgtttttctcgacgatcatccctatccgtttaaagtgaacccgcaattcaaagcgtgggtgccggtaactcaggtgccaaactgctggttgctggtggatggcgtgaacaagccgaaactgtggttctatctgccggttgattactggcacaacgtcgaaccgctgccgacctctttctggactgaagatgtggaagtgatcgcgctgccgaaagccgatggcattggtagcctgctgcctgctgcgcgcggcaatatcggttatatcggtccggtgccggaacgtgcgctgcaactgggtattgaggccagcaacatcaacccgaaaggggttatcgactacctgcattactatcgctccttcaaaactgagtacgaactggcctgtatgcgtgaagcgcagaaaatggcggtcaacggtcaccgcgcggcagaagaagcgttccgttctggcatgagcgagttcgatatcaacattgcctatctgaccgcgaccggtcatcgtgataccgacgtaccttacagcaacattgtggcgcttaacgaacacgctgcggtactgcattacaccaaactggaccatcaggcaccggaagagatgcgcagcttcctgctggatgccggggcagaatataacggctatgcggctgacctgacccgtacctggagcgcaaaaagtgacaacgactacgcgcagctggtgaaggacgttaatgatgaacaactggcgctgatcgccaccatgaaagcaggcgtcagctatgtggattaccacatccagttccatcagcgcatcgccaaactgctgcgtaaacatcaaatcatcaccgatatgagtgaagaagcgatggtcgaaaacgatcttaccgggccgtttatgccgcatggtatcggccatccgctgggcctgcaggtgcatgacgtcgctggttttatgcaggatgatagcggtacgcacctcgcggcaccggcaaaatatccgtacctgcgctgcacccgtattctccagccgggcatggtgttaaccatcgaaccgggtatctacttcatcgaaagcctactggcaccgtggcgtgaagggcagttcagcaagcacttcaactggcagaaaattgaagcactgaaaccgttcggcggcattcgtatcgaagacaacgtggtgatccacgaaaacaacgtggaaaacatgacccgggatctgaaactggcgtgatggaaagctggttaattcctgcggcaccggtcacggtcgttgaagagatcaaaaagagccgcttcataacgatgttggcgcataccgatggcgttgaggcggcgaaagcgtttgttgaaagcgtgcgggcagaacaccccgatgcccggcaccattgcgtggcgtgggtcgcgggtgcgccggatgattctcaacagctgggtttctctgacgacggggagccggcgggaacggcaggtaaaccgatgctcgcccagctaatgggcagcggcgtcggggaaattaccgctgtggtagtgcgctactacggcggcatattgcttggcaccggtgggttagtgaaagcgtatggcggcggcgtgaatcaggcgctgcgccagctaacgacccaacgcaagacgccattaaccgaatatactttgcaatgtgaatatcatcagttaaccggcattgaagcgttgctggggcagtgtgacggcaaaattatcaacagtgattatcaggcattcgttctgctgcgggtggcgcttccggcggcgaaagtggctgaattttccgcaaagctggcggattttagccgtggtagtttgcaattgttagcgattgaagaataatccccacttcgttttgcagaactaaggaagcggcagagatgcattttcgcgccattacccgaatcgttggactactggtcatcttatttagtgggaccatgattatccctgggctggtagcactcatctaccgggatggagcgggccgcgcttttacccagaccttttttgtcgccctcgccattggctctatgctgtggtggccgaaccgcaaagagaaaggcgaacttaaatcccgtgaggggtttctgatagtggtgctgttctggaccgtgctgggtagcgtcggtgcgctcccttttatcttcagcgaaagcccgaacctcacgattaccgatgcgttttttgaatctttctctggcctgaccactacgggagccactacgctggtggggctggatagcctccctcacgccatcctcttttatcgccagatgctgcaatggtttggcgggatggggatcatcgtgttggcggttgcgatactgcctatcctcggcgtgggtgggatgcagctctatcgcgcagaaatgcccggcccgctgaaagataacaaaatgcgcccgcgaattgcggaaacggcgaaaaccctgtggttgatttatgtcttgctgaccgtcgcctgtgcgctggcgttgtggtttgccggaatggatgcctttgatgccatcggccatagctttgcgactatcgctattggcggcttcagcacacatgatgccagtatcggttatttcgatagcccgactattaacactatcattgctatcttcctgctgatctccggctgtaactacggtctgcactttagtctgttaagtgggcgtagtctgaaggtttattggcgcgatccggaatttcgcatgtttatcggcgtacagtttacgctggtggttatttgtaccctcgtactgtggtttcataatgtctacagtagcgcgctgatgacaattaaccaggcgtttttccaggtggtgagcatggcgacaaccgccgggtttacaactgacagcattgcccgctggccgctctttttgccggtactgcttttatgtagtgcctttatcggcggttgcgccgggagtacgggcggtggcctgaaggtgatccgcatcctgctgctgtttaagcaggggaaccgtgagctgaaacgactggtgcatccgaacgccgtctatagcattaagctggggaatcgcgcactgccggaacgtatcctcgaagccgtttggggatttttctccgcctatgcattggtgtttattgtcagtatgctggcgattatcgccacgggcgtggatgacttttctgcctttgcgagcgttgttgcgacattgaataacctggggccagggcttggcgtggttgctgataactttaccagtatgaacccggtggctaaatggatcctgattgccaacatgctgtttggtcgtctcgaggtctttacattgctggtgctctttaccccgactttctggcgtgaatgatggagtaatacgtgaaaacattaattcttttcagtacaagggacggacaaacgcgcgagattgcctcctacctggctagcgaactgaaagaactggggatccaggcggatgtcgccaatgtgcaccgcattgaagaaccacagtgggaaaactatgaccgtgtggtcattggtgcttctattcgctatggtcactaccatagtgcgttccaggaatttgtcaaaaaacatgcgacgcggctgaatagcatgccgagcgccttttactccgtgaatctggtggcgcgcaaaccggagaagcgtactccacagaccaacagctacgcgcgcaagtttctgatgaacagccaatggcgtcccgatcgctgcgcggtcattgccggggcgctgcgttacccacgttatcgctggtacgaccgttttatgatcaagctgattatgaagatgagtggcggtgaaacggatacgcgcaaagaagttgtctataccgattgggagcaggtggcgaatttcgcccgagaaatcgcccatttaaccgacaaaccgacgctgaaataagcataaagaataaaaaatgcgcggtcagaaaattattttaaatttcctcttgtcaggccggaataactccctataatgcgccaccactgacacggaacaacggcaaacacgccgccgggtcagcggggttctcctgagaactccggcagagaaagcaaaaataaatgcttgactctgtagcgggaaggcgtattatgcacaccccgcgccgctgagaaaaagcgaagcggcactgctctttaacaatttatcagacaatctgtgtgggcactcgaagatacggattcttaacgtcgcaagacgaaaaatgaataccaagtctcaagagtgaacacgtaattcattacgaagtttaattctttgagcgtcaaacttttaaattgaagagtttgatcatggctcagattgaacgctggcggcaggcctaacacatgcaagtcgaacggtaacaggaagaagcttgcttctttgctgacgagtggcggacgggtgagtaatgtctgggaaactgcctgatggagggggataactactggaaacggtagctaataccgcataacgtcgcaagaccaaagaggggtaccttcgggcctcttgccatcggatgtgcccagatgggattagctagtaggtggggtaacggctcacctaggcgacgatccctagctggtctgagaggatgaccagccacactggaactgagacacggtccagactcctacgggaggcagcagtggggaatattgcacaatgggcgcaagcctgatgcagccatgccgcgtgtatgaagaaggccttcgggttgtaaagtactttcagcggggaggaagggagtaaagttaatacctttgctcattgacgttacccgcagaagaagcaccggctaactccgtgccagcagccgcggtaatacggagggtgcaagcgttaatcggaattactgggcgtaaagcgcacgcaggcggtttgttaagtcagatgtgaaatccccgggctcaacctgggaactgcatctgatactggcaagcttgagtctcgtagaggggggtagaattccaggtgtagcggtgaaatgcgtagagatctggaggaataccggtggcgaaggcggccccctggacgaagactgacgctcaggtgcgaaagcgtggggagcaaacaggattagataccctggtagtccacgccgtaaacgatgtcgacttggaggttgtgcccttgaggcgtggcttccggagctaacgcgttaagtcgaccgcctggggagtacggccgcaaggttaaaactcaaatgaattgacgggggcccgcacaagcggtggagcatgtggtttaattcgatgcaacgcgaagaaccttacctggtcttgacatccacggaagttttcagagatgagaatgtgccttcgggaaccgtgagacaggtgctgcatggctgtcgtcagctcgtgttgtgaaatgttgggttaagtcccgcaacgagcgcaacccttatcctttgttgccagcggtccggccgggaactcaaaggagactgccagtgataaactggaggaaggtggggatgacgtcaagtcatcatggcccttacgaccagggctacacacgtgctacaatggcgcatacaaagagaagcgacctcgcgagagcaagcggacctcataaagtgcgtcgtagtccggattggagtctgcaactcgactccatgaagtcggaatcgctagtaatcgtggatcagaatgccacggtgaatacgttcccgggccttgtacacaccgcccgtcacaccatgggagtgggttgcaaaagaagtaggtagcttaaccttcgggagggcgcttaccactttgtgattcatgactggggtgaagtcgtaacaaggtaaccgtaggggaacctgcggttggatcacctccttaccttaaagaagcgttctttgaagtgctcacacagattgtctgatgaaaatgagcagtaaaacctctacaggcttgtagctcaggtggttagagcgcacccctgataagggtgaggtcggtggttcaagtccactcaggcctaccaaatttgcacggcaaatttgaagaggttttaactacatgttatggggctatagctcagctgggagagcgcctgctttgcacgcaggaggtctgcggttcgatcccgcatagctccaccatctctgtagtgattaaataaaaaatacttcagagtgtacctgcaaaggttcactgcgaagttttgctctttaaaaatctggatcaagctgaaaattgaaacactgaacaacgaaagttgttcgtgagtctctcaaattttcgcaacacgatgatgaatcgaaagaaacatcttcgggttgtgaggttaagcgactaagcgtacacggtggatgccctggcagtcagaggcgatgaaggacgtgctaatctgcgataagcgtcggtaaggtgatatgaaccgttataaccggcgatttccgaatggggaaacccagtgtgtttcgacacactatcattaactgaatccataggttaatgaggcgaaccgggggaactgaaacatctaagtaccccgaggaaaagaaatcaaccgagattcccccagtagcggcgagcgaacggggagcagcccagagcctgaatcagtgtgtgtgttagtggaagcgtctggaaaggcgtgcgatacagggtgacagccccgtacacaaaaatgcacatgctgtgagctcgatgagtagggcgggacacgtggtatcctgtctgaatatggggggaccatcctccaaggctaaatactcctgactgaccgatagtgaaccagtaccgtgagggaaaggcgaaaagaaccccggcgaggggagtgaaaaagaacctgaaaccgtgtacgtacaagcagtgggagcacgcttaggcgtgtgactgcgtaccttttgtataatgggtcagcgacttatattctgtagcaaggttaaccgaataggggagccgaagggaaaccgagtcttaactgggcgttaagttgcagggtatagacccgaaacccggtgatctagccatgggcaggttgaaggttgggtaacactaactggaggaccgaaccgactaatgttgaaaaattagcggatgacttgtggctgggggtgaaaggccaatcaaaccgggagatagctggttctccccgaaagctatttaggtagcgcctcgtgaattcatctccgggggtagagcactgtttcggcaagggggtcatcccgacttaccaacccgatgcaaactgcgaataccggagaatgttatcacgggagacacacggcgggtgctaacgtccgtcgtgaagagggaaacaacccagaccgccagctaaggtcccaaagtcatggttaagtgggaaacgatgtgggaaggcccagacagccaggatgttggcttagaagcagccatcatttaaagaaagcgtaatagctcactggtcgagtcggcctgcgcggaagatgtaacggggctaaaccatgcaccgaagctgcggcagcgacactatgtgttgttgggtaggggagcgttctgtaagcctgtgaaggtgtgctgtgaggcatgctggaggtatcagaagtgcgaatgctgacataagtaacgataaagcgggtgaaaagcccgctcgccggaagaccaagggttcctgtccaacgttaatcggggcagggtgagtcgacccctaaggcgaggccgaaaggcgtagtcgatgggaaacaggttaatattcctgtacttggtgttactgcgaaggggggacggagaaggctatgttggccgggcgacggttgtcccggtttaagcgtgtaggctggttttccaggcaaatccggaaaatcaaggctgaggcgtgatgacgaggcactacggtgctgaagcaacaaatgccctgcttccaggaaaagcctctaagcatcaggtaacatcaaatcgtaccccaaaccgacacaggtggtcaggtagagaataccaaggcgcttgagagaactcgggtgaaggaactaggcaaaatggtgccgtaacttcgggagaaggcacgctgatatgtaggtgaagcgacttgctcgtggagctgaaatcagtcgaagataccagctggctgcaactgtttattaaaaacacagcactgtgcaaacacgaaagtggacgtatacggtgtgacgcctgcccggtgccggaaggttaattgatggggttagccgcaaggcgaagctcttgatcgaagccccggtaaacggcggccgtaactataacggtcctaaggtagcgaaattccttgtcgggtaagttccgacctgcacgaatggcgtaatgatggccaggctgtctccacccgagactcagtgaaattgaactcgctgtgaagatgcagtgtacccgcggcaagacggaaagaccccgtgaacctttactatagcttgacactgaacattgagccttgatgtgtaggataggtgggaggctttgaagtgtggacgccagtctgcatggagccgaccttgaaataccaccctttaatgtttgatgttctaacgttgacccgtaatccgggttgcggacagtgtctggtgggtagtttgactggggcggtctcctcctaaagagtaacggaggagcacgaaggttggctaatcctggtcggacatcaggaggttagtgcaatggcataagccagcttgactgcgagcgtgacggcgcgagcaggtgcgaaagcaggtcatagtgatccggtggttctgaatggaagggccatcgctcaacggataaaaggtactccggggataacaggctgataccgcccaagagttcatatcgacggcggtgtttggcacctcgatgtcggctcatcacatcctggggctgaagtaggtcccaagggtatggctgttcgccatttaaagtggtacgcgagctgggtttagaacgtcgtgagacagttcggtccctatctgccgtgggcgctggagaactgaggggggctgctcctagtacgagaggaccggagtggacgcatcactggtgttcgggttgtcatgccaatggcactgcccggtagctaaatgcggaagagataagtgctgaaagcatctaagcacgaaacttgccccgagatgagttctccctgactccttgagagtcctgaaggaacgttgaagacgacgacgttgataggccgggtgtgtaagcgcagcgatgcgttgagctaaccggtactaatgaaccgtgaggcttaaccttacaacgccgaaggtgttttggcggattgagagaagattttcagcctgatacagattaaatcagaacgcagaagcggtctgataaaacagaatttgcctggcggcagtagcgcggtggtcccacctgaccccatgccgaactcagaagtgaaacgccgtagcgccgatggtagtgtggggtctccccatgcgagagtagggaactgccaggcatcaaataaaacgaaaggctcagtcggaagactgggcctttcgttttatctgttgtttgtcggtgaacgctctcctgagtaggacaaatccgccgggagcggatttgaacgttgcgaagcaacggcccggagggtggcgggcaggacgcccgccataaactgccaggcatcaaattaagcagaaggccatcctgacggatggcctttttgcattggcgcagaaaaaaatgccggatgcgacgctggcgcgtcttatccagcctactcttgcttatccgttctgcttttgcatccactccaccacaaaatcagccagcccctcaacatcattaatatccagtaatgcgacatcaagattaagcggcacatcactggctacagcaataacatgcctgtctatcactaattcttcaggtcgatgtccggctccatcgcgaaacagcacaatctttgcgatctcttcatgcttaaacccttcgaccagaatcaaatccagcttactggtatccattcgacttgcgagaaactgtagatccagctcttcttcgtctggtgtttccgtcatcaaggcccatcgttgctggctggcaacgatggtttgtaccgcgccagccttgcgcagctcatagctatctttgcctggcttatcaacatccatatcatggtgcgtatgcttaatcagccctggacggatccctctggcgcataatgccgggatcagttttttcaaaagcgtagtttttccggtaccactccacgcggcaaaggcgagtaacggtatcatcgtttttcctgccatcgggcaagctcctctggcgtattcacgttaacaaatgcatctttatgatcgctgaaatcaaccgcatgaccgccagccagacgcataaataccattacccggcgttctcctgcttgcagatattccagtaataaaggctcaatagcgcggtttaccagagcaatagtcgggtgatcgcgttcaccgtcatggacccacacgacaggcgcatctttgcgctgatgattaagcctggctgctaaatcagggggaatgtaaggcgtatcgcacgggcaaaacaaaaaccactcaccagcttcctgctgcattacactaagcattcctgccagagggcctgggtaatccgccagactatcttcaatcactttcagaccgcttgcctgatagatttcctgatgacgattagcattaaccacgacgtgagagagctgcgtcataagcgcgtcagcgacatgttgccataatggtttgccgtttaattcaagcaatcctttatctacgccgcccattcgtctggctttaccgcctgccagcacaacgcctgttatcgtcgtcatcagattcaccgatatcgcctcttttattgtgggattgaccctgctaacgtgtctgtctcaagagtaaggagcatcactatgaaatgtaaacgtctgaatgaagttattgaactcctccagccagcctggcaaaaagagccagaccttaacctgctgcaatttttgcagaaactggcgaaagagagtggttttgacggcgaactggcggatttgacggatgacattctgatctatcacctgaaaatgcgtgattccgcgaaagatgcggtgatcccgggtttgcagaaagattatgaagaagacttcaaaacggcgctgttacgcgctcgcggcgtaattaaagagtaaaagcttgtaagcggcgccaccaaaatcatcgtgaaatgatatccttcgtcattcgtaatgttttccggatgatgggatgaataacagcgcttttactttccagacactacacccggataccatcatggacgctctgtttgagcatgggatccgggtggattccggtcttaccccgcttaacagctatgaaaaccgtgtctatcaatttcaggacgaagatcgtcgacgttttgtcgtcaaattttatcgccctgaacgttggacagccgatcaaatcctcgaagaacatcaatttgcgttgcagctggtaaatgatgaagttccggtcgcagcacctgtggcctttaacggtcagactttattgaatcatcagggattttatttcgctgtttttccaagcgtcggtggtcgccagttcgaagctgataatatcgatcagatggaagcggttgggcgttatttagggcgtatgcaccagacggggcgcaaacagctttttatccatcgcccgaccatcggtttgaacgaatatctcattgagccacgcaagctgtttgaggacgctacactgataccttccgggttgaaagcggcattcctgaaagcgacagatgagctgattgccgccgttacagcacactggcgggaagatttcaccgttctgcggctacatggagactgccacgccgggaatattctctggcgcgatggtccaatgtttgttgatctggatgatgcacgtaatggtccagccgttcaggatttgtggatgttgctcaatggcgataaagccgagcagcggatgcaactggaaactattattgaagcttatgaagaatttagcgagttcgacaccgctgaaatcggactgattgaacctttacgcgccatgcgtttggtttattatcttgcctggctaatgcggcgttgggctgatcccgcgttcccgaaaaatttcccgtggttaaccggggaagattactggctgcgacagacggcgacttttatagaacaggcaaaagttctacaagaaccccctttgcaattaacacctatgtattaatcggagagagtagatcatgaaaaagatttggctggcgctggctggtttagttttagcgtttagcgcaagcgcggcgcagtatgaagatggtaaacagtacactaccctggaaaaaccggtagctggcgcgccgcaagtgctggagtttttctctttcttctgcccgcactgctatcagtttgaagaagttctgcatatttctgataatgtgaagaaaaaactgccggaaggcgtgaagatgactaaataccacgtcaacttcatgggtggtgacctgggcaaagatctgactcaggcatgggctgtggcgatggcgctgggcgtggaagacaaagtgactgttccgctgtttgaaggcgtacagaaaacccagaccattcgttctgcttctgatatccgcgatgtatttatcaacgcaggtattaaaggtgaagagtacgacgcggcgtggaacagcttcgtggtgaaatctctggtcgctcagcaggaaaaagctgcagctgacgtgcaattgcgtggcgttccggcgatgtttgttaacggtaaatatcagctgaatccgcagggtatggataccagcaatatggatgtttttgttcagcagtatgctgatacagtgaaatatctgtccgagaaaaaataattcaatgtaaattacataaagcccgtgaatattcacgggctttttttattatttaataaatataaatacattctgataatgcatcctgccgctggacattatttcagcataagtggatattcaaagttttgctgttttatcagggaatatttatatgatacgtaagagtgctacaggtgttattgttgcgttagccgtaatctggggtggtggcacatggtacacaggtacgcaaattcagcctggtgtcgaaaaatttattaaagattttaacgatgctaaaaagaaaggtgaacatgcctacgatatgacgttaagttatcaaaattttgacaaaggcttttttaattcccgttttcaaatgcaaatgacattcgataacggtgcacccgatctcaatatcaagccaggccagaaagttgtatttgatgtggatgttgagcacggtccgttgcccatcacaatgttaatgcatggtaatgtcatcccagcactggcagcggcaaaagtgaacttagtgaataatgaactgacacaaccgctatttatcgccgcgaaaaataaaagccccgtggaagcgacattgcgattcgcgtttggtggcagtttctctacgacattagatgttgcccctgcagagtatggaaagttttcttttggtgagggccagtttacttttaatggtgatggtagtagtttgtctaacctggatattgaaggcaaagtcgaagatattgttctgcaattaagtccaatgaacaaagtaacggcaaaaagttttaccattgattctctggcgcgattagaagaaaagaaatttccggttggtgaaagcgagagcaaatttaatcagattaacattatcaatcacggggaagacgttgcccaaatcgatgctttcgttgcaaaaaccaggctggatcgcgttaaagacaaagattatatcaatgtcaatctcacctacgaacttgataagttaacaaaagggaatcagcaactcggtagtggtgagtggagtttgattgctgaatctattgatcccagtgcagtgcgccaatttatcatccagtataacattgcgatgcagaagcagcttgctgcacaccctgagttagcaaacgatgaagttgctctgcaagaagtgaatgctgcattgttcaaagagtatttaccgttattacaaaaaagtgagccgaccattaaacaaccggtaagatggaagaacgcactcggcgaactaaatgccaatctggatatcagtattgccgacccagccaaatctagtagttccacaaacaaagatatcaaaagcctcaattttgatgtgaagttaccgcttaatgtcgtcacagaaaccgcaaaacagcttaatttatctgaaggaatggatgcggaaaaagcgcaaaagcaggctgataaacaaatcagcgggatgatgacattaggtcagatgtttcagttaatcacgattgacaacaataccgccagcctgcagctgcgttatacaccgggtaaagttgtttttaacggacaggagatgagcgaagaagaatttatgtctcgtgccggacgttttgttcattaaaatactcactcgcctctgctcattcagaggcgagtaaaacttacttattctgacgctgactactcatgagagacgtcagaagccggtctttttcctgccacaaactgttcagccattgctgaaaatggcgcttaaagcttttgtcattgatgtagtcgccatgtaactcatcggcaataggctgtaaatccacatgtacgacaatccgcgtcagtttaccgcttaacatatcgaagaacggctgacggttattgtccggataacacagcgtaacattaagcagtttatcgaattgtttacccagtacatttagcgccatcgcaatgcctgccgcctttggtggcaacaagttttgaaaagtggagtgggtttgctgatgtttttcttgcgtgaaacgggagccttcaacgaaattgacaatggtggtgggatgcaggcgaaacttttcacaagaacgccgagtggtttcaacatctttaccacgtcgctccggatgacgtaataaataagcgcgggaataacgcttcataaacggcatatccaggctccagcacgccaggccaagaaatggcacccaggccagctgttgcttgaggaaatatttattcatcggaatgtgcttacgaaacagcacgcacagtacgacaacatctgcccaactacggtggttacaaataagcagataccagttcttcttacttaacccttccagcccgtgaacttcccattgaaggtgtgggttcagatgcagtaataccgccagaccttcacaccagcaatacatcataaaatcacaaaaacggctaacctttcgccaaatgactggcacaggtagcaatagttttacaatcccggcaatgatgatcgggacggaacaaaaaatagtgaccaaaatggtcaatacgatactcagcaaaagggttatcgcagcgagtattctcgtcataatgaatttattcaaaaggttagccatagacagtgcgctaaagaagcgcaaggcgcagattttagcagaaaacgacccaaataacggatgatccttaaggagaaaaataattcatatctatccacattagaaaaaatcccattatctcaattattagggatggatttatttttaactgcatgaaaaacaaagacaaacatcatgctgtaaaaagcatgataataaattaaaagcgatgtaaataatttatgcacaaagttatccacatgacgatttgcgagcgatccagaagatctacaaaagattttcacgaaaagcggtgaaaaactcatgttttcatcctgtctgtggcatcctttacccataatctgataaacaggcacggacattatggttcagatcccccaaaatccacttatccttgtagatggtagttcttatctttatcgcgcatatcacgcgtttcccccgctgactaacagcgcaggcgagccgaccggtgcgatgtatggtgtcctcaacatgctgcgcagtctgatcatgcaatataaaccgacgcatgcagcggtggtctttgacgccaagggaaaaacctttcgtgatgaactgtttgaacattacaaaagtcatcgcccgccaatgccggacgatctgcgtgcacaaatcgaacccttgcacgcgatggttaaagcgatgggactgccgctgctggcggtttctggcgtagaagcggacgacgttatcggtactctggcgcgcgaagccgaaaaagccgggcgtccggtgctgatcagcactggcgataaagatatggcgcagctggtgacgccaaatattacgcttatcaataccatgacgaataccatcctcggaccggaagaggtggtgaataagtacggcgtgccgccagaactgatcatcgatttcctggcgctgatgggtgactcctctgataacattcctggcgtaccgggcgtcggtgaaaaaaccgcgcaggcattgctgcaaggtcttggcggactggatacgctgtatgccgagccagaaaaaattgctgggttgagcttccgtggcgcgaaaacaatggcagcgaagctcgagcaaaacaaagaagttgcttatctcagttaccagctggcgacgattaaaaccgacgttgaactggagctgacctgtgaacaactggaagtgcagcaaccggcagcggaagagttgttggggctgttcaaaaagtatgagttcaaacgctggactgctgatgtcgaagcgggcaaatggttacaggccaaaggggcaaaaccagccgcgaagccacaggaaaccagtgttgcagacgaagcaccagaagtgacggcaacggtgatttcttatgacaactacgtcaccatccttgatgaagaaacactgaaagcgtggattgcgaagctggaaaaagcgccggtatttgcatttgataccgaaaccgacagccttgataacatctctgctaacctggtcgggctttcttttgctatcgagccaggcgtagcggcatatattccggttgctcatgattatcttgatgcgcccgatcaaatctctcgcgagcgtgcactcgagttgctaaaaccgctgctggaagatgaaaaggcgctgaaggtcgggcaaaacctgaaatacgatcgcggtattctggcgaactacggcattgaactgcgtgggattgcgtttgataccatgctggagtcctacattctcaatagcgttgccgggcgtcacgatatggacagcctcgcggaacgttggttgaagcacaaaaccatcacttttgaagagattgctggtaaaggcaaaaatcaactgacctttaaccagattgccctcgaagaagccggacgttacgccgccgaagatgcagatgtcaccttgcagttgcatctgaaaatgtggccggatctgcaaaaacacaaagggccgttgaacgtcttcgagaatatcgaaatgccgctggtgccggtgcttagtcgcattgaacgtaacggtgtgaagatcgatccgaaagtgctgcacaatcattctgaagagctcacccttcgtctggctgagctggaaaagaaagcgcatgaaattgcaggtgaggaatttaacctttcttccaccaagcagttacaaaccattctctttgaaaaacagggcattaaaccgctgaagaaaacgccgggtggcgcgccgagtacgagcgaagaggtactggaagaactggcgctggactatccgttgccaaaagtgattctggagtatcgtggtctggcgaagctgaaaagcacctacaccgacaagctgccgctgatgatcaacccgaaaaccgggcgtgtgcatacctcttatcaccaggcagtaactgcaacgggacgtttaagcagtaccgatcctaacctgcaaaacattccggtgcgtaacgaagaaggtcgtcgtatccgccaggcgtttattgcgccagaggattatgtgattgtcagtgcggactacagccagattgaactgcgcattatggcgcatcttagccgtgacaaaggcttgctgaccgcattcgcggaaggaaaagatatccaccgggcaacggcggcagaagtgtttggtttgccactggaaaccgtcaccagcgagcaacgccgtagcgcgaaagcgatcaactttggtctgatttatggcatgagtgctttcggtctggcgcggcaattgaacattccacgtaaagaagcgcagaagtacatggacctttacttcgaacgctaccctggcgtgctggagtatatggaacgcacccgtgctcaggcgaaagagcagggctacgttgaaacgctggacggacgccgtctgtatctgccggatatcaaatccagcaatggtgctcgtcgtgcagcggctgaacgtgcagccattaacgcgccaatgcagggaaccgccgccgacattatcaaacgggcgatgattgccgttgatgcgtggttacaggctgagcaaccgcgtgtacgtatgatcatgcaggtacacgatgaactggtatttgaagttcataaagatgatgttgatgccgtcgcgaagcagattcatcaactgatggaaaactgtacccgtctggatgtgccgttgctggtggaagtggggagtggcgaaaactgggatcaggcgcactaagattcgcctgaacatgccttttttcgtaagtaagcaacataagctgtcacgttttgtgatggctattagaaattcctatgcaacaactgaaaaaaaattacaaaaagtgctttctgaactgaacaaaaaagagtaaagttagtcgcgtagggtacagaggtaagatgttctatctttcagaccttttacttcacgtaatcggatttggctgaatattttagccgccccagtcagtaatgactggggcgttttttattgggcgaaagaaaagatccgtaatgcctgatgcgctatgtttatcaggccaacggtagaattgtaatctattgaatttacgggccggatacgccacatccggcacaagcattaaggcaagaaaattattcgccgtcctgcgtttcttctacaggctgcatctcgctaaaccaggtatccagtttctgccgcagcttgtccacgccttgtttcttcaagctagaaaacgtttcaacctgcacatcaccgttaaacgccagtacagcttcacgcaccatattcaattgcgctttacgtgcgccgcttgccagtttgtccgctttggtcagcagcaccagaacggcgatattgctgtctaccgcccactcaatcatctgctgatccaaatctttcagcggatggcgaatatccattagcaccaccagaccttgcaggctctgacgtttttcgaggtattcgccgagcgcacgctgccatttgcgcttcatctcttccgggacttccgcataaccgtacccaggcaagtcaaccagacgcttgccgtcagccacttcaaacaggttgataagctgggtgcgccctggggttttactggtacgagccaggcttttctggttagtcagcgtgttcagcgcgctggatttacctgcgttggaacggcctgcaaaagccacttcaattccggtatcggaaggtaggtggcgaatatcaggcgcactcatcacaaaatgcgtctgttgataattcaaattagtcaaagcggtcgtctccgtcagtcaaagctttgtggcgattatacctgaaccataataaaaggcggatttttcggcgtgagcgttgtaagtaaaagccatacgctttgtgagacattgccgatagtctttatgcgaaatagcagagaaaattctgcgatgcatgtcaaataagctatataaatcagtgaattgcttttatataaaactctgaaaatgtgcaaatactgatggcggttgattgtttgtttaaagcaaaggcgtaaagtagcacccatagagcgaggacgctaacaggaacaatgactcaggatgagggtcaggagcgccaggaggcgaagacagaggattgtcaggaagacaaacgtccggagacgtaattaaacggaaatggaatcaacacggattgttccggctaaaggaaaaacagggtgtgttggcggcctgcaaggattgtaagacccgttaagggttatgagtcaggaaaaaaggcgacagagtaatctgtcgccttttttctttgcttgctttctgttagattccgccgcaaatctatactgaataaaacggctaaaagacgaaccattatgaaaccaagttctagtaacagtcgcagcaaaggtcatgcaaaagcgcgtcgaaaaacacgcgaggagctggatcaggaagctcgtgatcgcaagcgtcagaaaaaacgtcgtggtcatgcgccgggcagccgcgcagcgggcggaaacaccacgagtggcagcaaaggccagaacgcaccaaaagatccacgtattggcagtaaaacccctattccattgggcgtgactgaaaaagtcaccaaacagcacaaaccgaagagtgagaaacctatgcttagtccgcaggcggagttggaattactggaaacggatgagcgtctggatgcgctgctggaacgtctggaagcaggcgaaaccctgagtgccgaagagcaatcctgggtggatgctaaactggatcgtattgatgagttgatgcagaaactcggcctctcttatgacgatgacgaagaagaggaagaagacgagaagcaagaagacatgatgcgtctgctgcggggcaactaacggattgccgccgtgggccttcccgttctgctgataacccttccggttatatgttatctggtgtggttattcgttaaactacagcggttgtcgcggcgacaaaagtggctgcgcaaccggctgatgacccgaaacgggcatccgccggtacgccgtagccgccagagacgccatcggaaggagtgagcatgtctgtacagcaaatcgactgggatctggccctgatccagaaatataactattccgggccacgatacaccagctacccgaccgcgctggagtttagtgaagacttcggcgaacaggcgtttttacaagccgtggcgcgctatcctgagcgtccattatctctctacgtacatatcccgttctgccataagctttgttacttctgcggttgcaataagattgttactcgccagcagcacaaggccgatcagtatctggacgcgctggagcaagaaatcgtccatcgtgcaccgctgttcgccgggcgtcacgtcagccaattgcactggggcggcggaacgccgacgtatctgaataaagcgcaaatcagccgcctgatgaagctgctgcgcgaaaacttccagttcaatgccgatgcggagattagcatcgaagtcgatccgcgggaaatcgaactggatgtactcgatcatttacgcgccgaaggctttaatcgcctgagcatgggcgtgcaggacttcaacaaagaagtgcaacgtctggttaaccgcgagcaggatgaagagttcatctttgcactgcttaaccatgcgcgtgagattggttttacctccaccaacatcgacctgatttacggcctgccgaaacagacgccggagagtttcgcctttaccctgaaacgtgtggcggagctgaaccccgatcgtctgagtgtctttaactacgcgcatctgccgaccatttttgctgctcagcgcaaaatcaaagatgctgacctgccgagtccgcagcaaaaactcgatatcctgcaggaaaccatcgccttcctgacgcaaagcggctatcagtttatcggtatggatcactttgcccgtccggatgacgagctggcggtggcccagcgtgaaggcgtgctgcatcgtaacttccagggctacaccactcagggcgataccgatctgctggggatgggcgtttccgccatcagcatgattggcgactgctacgcgcagaaccagaaagagttgaagcagtactatcagcaagtggatgaacaaggcaatgcgctgtggcgtggtattgcgctaacgcgtgatgactgtattcgccgcgatgtgattaagagcctcatctgcaacttccgtctggattacgcccctattgagaaacagtgggatttgcacttcgctgattactttgcggaagatctcaagctgctcgccccgttagcaaaagatgggctggtggatgtggatgagaagggaatacaggtgacggcgaaaggtcgcttgctgatccgcaacatttgcatgtgctttgatacctatctgcgccagaaagcgcggatgcagcagttctctcgggtgatttaaatagtgaatggcgcttcgtttacaaagtagaaaacgaaagcgccatcaatgtgctgagaacaagattgcctgatgcgctgggcaacaaaacctgttgaaattattgcttttgtaggccggataaggcgtttacgccgcatcaggcatctgagcatgatgcctgatgcggcgctggtcgcgtcttatcaggcctacgactttctccgcatccggcataaacaacgagcttcagctaaacagcccaatcattgcggcacacagcacggcagcaacggcagtttgcggtgtgtggctgtcaactgcgccactcgataccagattaattattgattccagcataatgactctccccgttttccgggcaagatcatactgaacttatcggaacagtaaagcgtaaaataccagcaatttgcgctcaataatcaatctttacacacaagctgtgaatcactccatccccagctcttttaacttacgcgtcagggtgttgcggccccagccgagtagccgcgccgcttcctgtttatgcccctgcgtatgtcgcaacgcggtcgtcagtaacgtccgctccagctctggctgcgcttcggaaagcagattttgatgaccggaacgcagcgctctgtctgcccactgcgcaagaagcgtcgcccagctgtccggttgcatttggctagtactctccgcaaccgtactttcaaacagttcgccgggcaaatcctgaatcaacacttcctgcccggcggccatcaccgttagccagcggcaggtgttttccagctggcgcacgttgcctggccacgccagacgcgtcagagcagcttcggtttccggatgcagtaacttcgcttctacgcccagttcgcgcgcggcaacctgtaaaaaatggcgcgccagacggggaatatcttcccgacgttcgcgcagcggcggcagatgaacgcggataacgttcaggcggtggaacagatcctcacggaacttaccttcctgcactcgctgttcgagattctggtgagtggcagcgataatccgcacatccactttcaccggcgcatagccgccaacgcggtaaaactgaccgtctgccagcacgcgcagcaaacgcgtctgcacatccagcggcatatcaccaatttcgtcgaggaataatgtaccgccatcggcctgttcaaaacgcccctgacgaatggtattcgcgccagtaaacgcgcctttctcgtggccaaacagttcactttcgatcaaatcttttgggatagctgccatattcagcgcgataaacggcgctttggcgcgcggactgtggcgatgcagggcatgagcgaccagttctttaccggtgccggattcgccgttaatcagcacgctaatagaagaacggctaagccgaccgataatacggaacacgtcctgcatggctggcgcttcgccgatgatatcggtcgttgggccgttaagctgaacattacgcggctgctgctgttcctggtaatgactgatagcgcgctcaaccagcgccactgcttcgtcgatatcaaacggtttgggcagataatcaaacgccccttgttgataggcgctgacggcagcatccagatcggaatgtgcggtcataatgatgaccggaagcattggatggcgctgtttaatctgcttgagcagcgccagcccgtccattcccggcatacggatatcactaagcagcacatccggcgttttgctcgccagcgcctccagcacttctgcgccgttctcaaacgtcgtacaggttaaacctgccccagcgagcgcacgttcaagcacccaacggatggaactatcgtcatcgactacccagactatccctcgttgcataaacgtcacctttatttcctgataggcaggtaaacgctgaactcggtatgccctggccaactggtaaattcaattttgccactatgctgatcaatcaaattacgagcgatggataagccaagcccggtgccaccttcgcggccgctgaccatcgggtaaaacagcgtatcctgcaaatgaggcggaatgcccggcccgttatcttccacatcaatccgcgccgccagccggtagcgctcgccgtgtaaggtcagttgaaacgcggtgcgggtacgcagaatgatttcaccgccttccggccccagcgcctgtagcgcattgcgcacaatattcagcaagacctgttcaatttgatccgggtcgtgcgccagttccggtaggctgggatcgtaatcacgaatcaaccgcacgttgtccggcagttccatgctcaccagcgttaccacgcgttcagccactttgtgaatactttcggtaacgcgcgtaccgggcagctgcggccccaacagacggtcgaccagatttcgcagccggtccgcctgttcgataatcactttggtatattcgagtagacttgggtcaggtaacgctttgctgagcagctgcgccgcgccacgtaaaccgccaagcggatttttaatctcatgtgccaggccgcgcactaaatcacgggcagcaacctgctgggcgtgctgtagctgttcctgacttaagcggcgctggttatccatcggagccatctccagcaggatcatgccgtccggcatacgctgggccgtcacagaaaggatatggctgcgcccgtcgatgaccagcgtcacttcgttatcggtaaaaccttgccccgcctccagactttcttgcatcagctcgatatttaaactgaagtagctcaacagttccggtaacggtgtaccaaacaatttgcgggagctttgggcgagcagttgttgcgcggcagggttggcgtaatggatcgccaggttgtcatcgattaacaaaatactgttaatcaggctgttgaggatctgcccagcatcgggctgcgtgcctgttgccataaagcagtctcctgaacaggttgcaccattttagtgcattatagctttttacggataaaaagcgcgaagcatcagagaattgacggagaaaaaagcccatgcagagatgggctacagatagctgacaaacttcacgttggagagcgactcacctgctccggcctaccacatcatcaccgtgtaggccggataagacgcatttgcgtcgcatccggcgtgatgtgcttgccaccgatcccaggcctgccagagacaggcgaaaagtttccacggcaactaaaacacttagacgctgtagtacagctcaaactctaccggatgcggagtcatacgcacgcggtcatcttcttcgcgacgcagagcgatgtacgcatcaattgcttcgtcagtgaacacgccaccggctttcaggaactcgcggtccagatccagttcgttcagtgcttcttccagagagcctgcaacctgtgggatctctttcgcttcttctggcggcaggtcatacaggtttttgtccatggcttcgcccggatggatcttgttcttgataccatcaagaccggccatcagcagggcagcaaagcacaggtacgggttagctgccggatccgggaaacgtacttcgatacgacgtgctttcggagaagaaaccaccggaatacggatagacgcagaacggttacgcgcagagtaagccagcattaccggtgcttcatagcccgggaccagacgcttataagagttggtggtcgggtttgccagggcgttaatcgctttagcgtgtttgattacgccgccaatgtagtacagcgcctgctcagacagacctgcgtatttgtcgcctgcgaacaggttaacgccgtttttagacagagacatgtggcagtgcataccggagccgttatcaccgaacatcggttttggcataaaggtcgcggttttaccgaagcggtgcgctacgttgtgcacaacatatttgtagatctgaatttcgtcagcttttttggtcatggtattgaagcgggtagccacttcgttctgaccagcagtcgctacttcgtggtgatgggcttcaaccaccagacccatctgttccatcaccagacacatttcagaacgaatatcctgagcgctgtctaccggtggaaccgggaagtaaccgcctttcactgccggacggtgacctttgttaccaccttcgtattgggtggaggagttccatgcgccttcgatatcgtcgatagcaacgtgggaaccggagatagaacttccgaaacggatgtcatcgaacaggaagaattcaggttctggcccgaacagtacggtgtcggcaatgccagtggaacgcaggtaatcttcggcgcgcttcgcaatggagcgcgggtcacggtcatagccttgcagggtgccaggttcaaggatgtcgcaacggataatcagggtggagtcggcgaagaacgggtcaatcactgcggtggatgcgtctggcatcagcaccatgtcggactcgttaatgcctttccagccgccaatgctggagccgtcaaacattttgccttcttcgaagaattcagcattcacctgatgagcagggatagtgacgtgctgttctttacctttagtatcggtgaagcgcaaatcaacaaacttcacttcgtgctcgttcagcatcgtcagtacgtgttcagcggacatactttaactctcctggattggtcatggtcgtcgtggtaacgaaatctgcaattattttggccgtgtcgccgtaaaaaagataaagcgaaatctgtgccaacttttaaattgcccctaaaaggcgttatcatgcgcaccatcgtgcaaaagggctgcaccacgatgtgaatgttgcaccaatatagtgcttcaatggaaacattaagcaccatgttggtgcaatgacctttggataaccctttttatgctccgtgaaagcgatcacaaagggactctgcaatacttgtttgcggaggatgtttgtgatcctgttttgtagtgcgattaatccgtgtacaataacgcgctatttctaatgcctgaggcaaagttgtgatcgaaaaattgcgtaatatcgccatcatcgcgcacgtagaccatggtaaaaccaccctggtagacaagctgctccaacaatccggtacgttcgactctcgtgccgaaacccaagagcgcgtgatggactccaacgatttggagaaagagcgtgggattaccatcctcgcgaaaaacaccgctatcaaatggaatgattaccgtatcaacatcgttgataccccggggcacgccgacttcggtggtgaagttgaacgtgtaatgtccatggtagacagtgtgctgctggtggttgacgcatttgacggcccgatgccgcaaacgcgcttcgtaaccaaaaaagcgtttgcttacggcctgaagccgattgttgttatcaacaaagttgaccgccctggcgcgcgtcctgattgggttgtggatcaggtattcgatctgttcgttaacctcgacgcgaccgacgagcagctggacttcccgatcgtttacgcttctgcgctgaacggtatcgcgggtctggaccacgaagatatggcggaagacatgaccccgctgtaccaggcgattgttgaccacgttcctgcgccggacgttgaccttgacggtccgttccagatgcagatttctcagctcgattacaacagctatgttggcgttatcggcattggccgcatcaagcgcggtaaagtgaagccgaaccagcaggtcactatcatcgatagcgaaggcaaaacccgcaacgcgaaagtcggtaaagtgctgggccacctcggtctggaacgtatcgaaaccgatctggcggaagctggcgatatcgttgcgatcacgggccttggcgaactgaacatttctgacaccgtttgcgacacgcaaaacgttgaagcgctgccggcactctccgttgatgagccgaccgtttctatgttcttctgcgttaacaccagcccgttctgcggtaaagaaggtaagttcgtaacgtctcgtcagatcctggatcgtctgaacaaagaactggtacacaacgttgcgctgcgcgtagaagaaaccgaagacgccgatgcgttccgcgtttctggtcgtggcgaactgcacctgtctgttctgatcgaaaacatgcgtcgtgaaggtttcgaactggcggtatcccgtccgaaagttatcttccgtgaaatcgacggtcgtaaacaagagccgtatgaaaacgtgactctggacgttgaagaacagcatcagggttctgtaatgcaggcgctgggcgaacgtaaaggcgacctgaaaaacatgaatccagacggtaaaggccgcgtacgtctcgactacgtgatcccaagccgtggtctgattggcttccgttctgagttcatgaccatgacttccggtactggtctgctgtactccaccttcagccactacgacgacgtacgtccgggtgaagtgggtcagcgtcagaacggcgtactgatctctaacggtcagggtaaagcggtcgcgttcgcgctgttcggtctgcaggatcgcggtaagctgttcctcggtcacggtgcagaagtttacgaaggtcagattatcggtattcatagccgctctaacgacctgactgtaaactgcctgaccggtaagaaactgaccaacatgcgtgcttccggtactgacgaagccgttgttctggttccgcctatccgcatgactctggaacaagctctggagttcatcgatgatgacgaactggtagaagtgactccgacctctatccgtattcgtaaacgtcacctgacggaaaacgatcgtcgccgcgccaaccgcgcaccgaaagacgattaatttcgttttttagtcataaaaaacctgccagcgatggcaggtttttttttgcctgtcgtgagcgcacaccaatgcgagtatctcccttataagtctgtggttacgtcaatagagagctttgtcacaattatctgcaaagtcatacgccgttaattgctttcttttttggcgtaagcgtaagatgcttcatctggtttaaaccaaaaggattaaacaatggcggagaatcaatccaccgtagaaaatgcaaaagagaaactggatcggtggttgaaagatggcatcaccacgccgggtggaaaactccctagtgaaagagagctgggagaactgctgggcattaaacgtatgacgctgcgccaggcgttgttgaacctcgaggcagaatccaaaatcttccgtaaggatcgtaaggggtggttcgtgacccagccgcgatttaattacagtccggagctgagcgcgagctttcagcgggccgcaattgagcaagggcgagagccttcctgggggtttaccgagaaaaaccgtaccagcgatattcccgagacgctcgcgccactgattgcagtgacgccaagtactgaactctatcgcatcaccggctggggggcgctggaaggacataaagttttctatcacgaaacatatattaatcctgaagttgctccgggctttattgaacaacttgaaaaccacagtttttctgcagtctgggaaaagtgctaccaaaaagagacggtagtaaaaaaattgattttcaaacccgtcagaatgccgggcgatatcagcaagtatcttggcggttctgcgggtatgccagcgatcttaattgaaaagcatcgcgccgaccagcaaggcaatattgtccaaatagatattgaatattggcgatttgaggccgtagacctcatcattaatctgtaagtgttttatggtgacaataaataacgcaagaaagattctacaacgtgtcgacactcttcctctttatttacatgcttatgcctttcatttaaatatgcggctggaaagagtgttgcctgctgatttacttgatatcgcaagtgaaaataatctacgtggcgtcaaaatccatgttctcgatggcgagcgtttttctcttggtaatatggacgataaagaactctctgcctttggggataaagcccgccgtctgaaccttgatattcatattgaaaccagcgccagtgataaggcatctattgacgaagccgtcgccatcgcgttgaaaactggggcaagctccgtacgtttttatccacgttatgaaggtaatttgcgcgacgtattaagcattatcgctaacgacattgcctatgtacgggaaacgtatcaggacagcggcctgacttttacgatcgagcagcatgaagatttaaaaagtcatgagctggtgagcctggtcaaagaaagtgagatggaatctctttccttactgtttgattttgcgaacatgatcaatgcaaatgagcatcccatcgacgctttaaaaacgatggcaccgcatattacccaggtccatatcaaagatgccttgatcgttaaagaaccgggtggcctgggtcataaagcctgtattagtggtcagggtgatatgccgttcaaagcgttattaacgcaccttatctgcctgggtgatgatgagccgcaggtgacggcatatggcctggaagaagaggttgattactatgcgccggcgttccgctttgaagacgaagatgataatccgtggatcccttatcgccagatgagtgaaacaccattgccagaaaatcatttactggatgcgcggttacgtaaagaaaaagaagatgcaattaatcagataaatcatgtgcgtaacgtactacaacaaatcaaacaagaggcaaaccatcttctgaaccactaataagttttaactcatacgcagttaataaaaccattccatatgaatggtcggtatcttattgcctttaaaacagtgattttaaaaatcgcttaggggatgttatgctcacgaaaaagaaatgggcgttatttagtctattaacactgtgtggcggtacaatttataaattaccgagcctgaaagatgcgttttatatcccgatgcaggaatatttccatttgaccaatggtcaaattggtaatgctatgagcgtaaacagttttgtcaccacagtgggcttttttctgtctatttattttgccgataaactaccgcgcagatacaccatgagtttcagtctcattgcgacaggattactgggtgtttatttgacgacaatgccggggtattggggcatcctctttgtctgggcgctatttggcgttacttgcgacatgatgaactggccggtcttgctcaagagcgtaagtcgattgggcaatagcgaacaacaaggtcggttgtttggcttcttcgaaacagggcgtggcattgtcgataccgtggtggcattttctgcgttggcagtatttacctggtttggcagtggcttattaggttttaaagcaggcatctggttctattcccttattgtgattgccgtaggcattattattttctttgtcctgaatgacaaagaagaggcaccgtccgttgaggtgaaaaaagaagacggagcaagcaaaaacaccagtatgaccagcgtgctgaaagacaaaactatctggcttatcgcttttaacgtcttcttcgtttacgcggtttactgtggcctgacattcttcattccattcctgaaaaacatctatctattgcccgttgcgctggtgggggcttacggcatcattaaccaatactgtctgaaaatgattggtggaccgattggtggcatgattagtgataagatcctgaaaagcccaagtaaatatctatgctacacctttatcattagtaccgctgcgctcgtactgttgattatgctgccgcacgaaagtatgccggtctatttagggatggcatgtacgctgggctttggcgcgatagtctttacacagcgagccgtattttttgcacctatcggcgaagcaaaaattgctgaaaataaaacaggtgcggcgatggcgttgggtagctttattggttacgctccggcgatgttctgcttcagtctgtatggctacattctggatttaaatccggggattattggctacaaaatcgtgtttggcattatggcctgcttcgcattcagtggtgcggtggtttccgtaatgctggttaagcgtattagccaacgtaagaaagagatgctggcggctgaagcttaattaatggccggatgtgcttaatccggccaacgaaaaccgtatcaaccgtaggccggataaggcgtttacgccgcatccggcagtttcacatcagaagaaatacttcgtcccgatacggatctggttttgctcgcggtggtacggttcgacgttgcggtctaaccagcgcaattcgaaataagggagccagtgttcattaatacggtaacggaaggtgttagtgatttcccaatgatgatctttcccgttgctactattaaagtcattcactcgcatgaagtaatgtggctcaaatgtataggaaaatttatcggtgattttaaaattccagtaggtgccaatttcataggtgtcattattatccagttccccgctcaaatctgtactactatagttattatggttatagcgatttcgtactgtcagattaaaccatggtacaaatttatagttgacgtccagatacactgcaccaccgctaccgatactcttatcattaattaagccaccgggctggatggttaatttatcggttggtttaaataacggataccagccttcaatttcgttatatccatgttttagttcatcttctcgctgaaagttgtaggtattggttaacataatacccgcgcccatatcgaagttataacccacacgtagcataacctcgccctgatcggaggcaagattatatgcctccctgttttcgacgtatgcgccagcaaatacgctggcagaggtcagagaagataataaaattattgcattaatctttttcataataagtccattttttaaacgtagggaggccgccacccaccaggatggaaatagcggctattgacatttataacgttacggaagccgttttttcttctgtcgccatctctttatttttgcgttggttgatttcctcaataatcaatgcaaaccgtttttcattgagtgtgtaaaagaatcccatcgtcaatgcagcaataattgccagtgcacaaggccagataaaaatgagctgacgcaaaccctgtaatgtcgcatcgctttgcgcgatgttgggaacataaccaatttgcgtcagcataatgcctggcaagaagccagcaagtgcggcagaaattttacgaaagaaggtataaccggtataaacagaaccttcggcacgaataccggttttccattcaccgtaatctacggtatctggtaccagtgcccagttcaggctgtttacaaaggccgtgccaaaaaaggcgacacaagagaacatgacgaaagtgaaagagttacttccccagaaataattcagtatatcacccaccgcccacagcaccatgccagccagataaacctgttttttaccaaaacattttacagttaatggcaccagtaatacgccgatgaggatgcatcccatactgaagaatcccatccagctcaataaattaatatcattcagcacatactgggtgtaatagacctgaatcgccagtttgatattaaatgccgccagggtacacaagttagcaatgcataaaaccagcaatggcggattccgaaatatcgcgcaaaaacttttgagaatactggctttatgtccggttggcgttgtgtccacataatgctctttgacgcctctgtagcacagcatcataaaaataaagccgccaatggagaacataagtgccgcacaggcataaccgacggtactgtcagaaaaaaggctctgcaacggaataaacgccacggtacaaatcaatagccctatggttgcaccaccctggcggtaagccgcgagctgcgcgcgctcattcgggtttttggtaattgccgggatcatcgcaccatagctgcagttcatcagactgtaactaagtccaaacatcataaacagcgcggtggcaatcgtcgttttaaccggcaaacaaaaggtggtggcgataaactggagcgttgcaattaacgccgccggaaccgctgcatataaaataaagggacgaaatttgcctttaggcccaatatttttccggctgtcgagtaaaaatccggtgagcatatcggtaaacgcggtaaaaaacttcgccaccagaaagataatcccgccatagtaagcaggcatccctaattcatcggtataaaatttgaggagatacagagtaccgatgcagagcattaaattgctaccgacgtcgcccataccataggcgattttttcccgcagattcagttttaatgtcagtggattatggtcagacataatcactccttataacgccccgcagggcgtcgtttattattattacgccgtgcgtttacgggcttctatctcttccacaatgcggacatacatcttctcgttcaggctgtagaagcaacccatcgccacaatggtgactaccgccagtgcgcttgggtagatgaagatcaactggcgtaacccttcaatggtgtggtcagcctgtgcgacgttcggcacatagccaatttgcgtcagcatccagccggggaagaaaccagccagcgcctgagacactttgcgaaagaaggtaaaaccggtgtagaccgttccttcgctacgcacgccggtgcgccactcgccgtactcgacggtgtcggaaaccagcgcccagttcaggctgttaacaaacgcactgccaaagaacgccaggcaggagaacgccacgaagctgacgctaccgccgccgaagaaatagttgagcagatcgcccagcacccaaatcagcaggccgccgatataaactttcttcttgccaaaacgtctgacactggcaggcatcaggaatacgccgatgaaaatacagcccatgctgaaaaatcccatatagctcaacaggatgggatcgttaagcacgtactgggtgtaatagacctggatggcgagcttgacgttaaacgcccctaaagtgcagaggttggcaatgcacagaatgaacagcgggcggttacccgcaattgcgcggaaagattgcagcaggcccggcttttgcgccggattagcaggctgggtttcgacataacgctctttcacgccgctgtagcagatccacataaacagcaggccaaacagactaaacagcgtggcggcgaagatatagccaagttgctgattaccttcgataagattcataactggcacgaatcccaccgtgcacagcagcaggcccagcgtagcgccgccctgacgccatgccgccagactggcgcgttcgttggggtttttggtgatagcgggaaccattgcgccgtaggagcagttcatcatgctgaaaaacagtccgtaaagcataaacagaatagtggccatcaccgttttaccggtgacatcaaacggtgtgccgacaaagttggcgatcgccagtaaggtgaccgggaaactcgcatacagaataaaaggacggaacttaccttttggaccgatcttgcgtcgggaatccaacataatgccggtacccatatcggtaaacgcagtaaagaatttactaatcaaaaagataatgccgccataggtgcctggcagccccagaacgtcggtataaaacttcaaaagataaagcgtaccgatatccagcaggatgttagaggccaggtcgccaataccgtaagagagtttctctttaaagggcaggcgtaaagttgctggatcttccgttgtgatgtgactcatgcttgttctccctttgcccatgagtttccccacgggcggatgtgattagatgctttttaagctcgcgaacagtgccgcccattcgctatcggcgcgataaaagaccggcggcttgccgatgggcgcattaacggtaacttccccgccccggaacgcttcacccgtccaggcgtggacccagttatcctccggcagatagagcgtccagtcgctacggccttcttcatgcaccggagcgaccagaatgtcgcgacctaacaggtactgatatttcagggtgtaagtgtgcgcatcgtcttcgtaatgcaggaacagcgggcgcataaccggcaggccggacttcgcattcagcgcgacggcctctttcaggtaaggtttcagggtggtgaagacggtggtcatacgggcgaaatgggcgatggtttctgcgtcgccgtcaaactgccagttgtcgccaggacggttaccttcgtgggtgcgcatcatcggcgtgaaggcgctgaaatcgcaccagcgcagcagcagctctttgctgcgcttcatctcaaacagggtggtgtaaccgccaatgtcgctgtggtgcaggccatgtccggtcattgccaggctcagcgccgccgggacaacgctcgccaggccatcgtcgagactccagtcgacgttctggtcgcccgcccacatcatggtggagtatttctggctaccggtagaaccggcgcgcataaagaaaaggatctcgccgagcttgcccgtttcttcaagggcttcgtagttacacttcgcccacagcgcaggccaggcgttatgcataatttcggcactgacgccgttatgcaagtacgtgtcggtgggcagatactcgccgaagtcagccatccagccgccgcagccgagttcaatcatgttctttttgatcacttccttgaaccaggcgtaggcttctggattagtgagatcgacaacgccgccgtaaaactcgccaaactccaccagatagtcaccgccagaggcatcttttgccagatagccgtgttgtgccgcttcttcgcagagatctttatcgctggcaacatacgggttgatataggccaggaactgcacgccctcctgattccactgcttaatgcgactatccagttgcgggtagttttcgctgttccacttccagttccacatcacgcgtttgccaaaagaggtcatacgaataccggaccagtcctgcgcccagatgccgttgaccttcacgcccgcgttacgcatggtgtccagtttcttctggcacacttccgtcccgccctgaatgccgagcgttactccgtcataaatccagtcgggcagttctggctggcgtcccagcagggcggttaatttttccagcagggaaatgtatgtgtcagcacattcaaaacgcagcgttgctttgtcttcccacagcgccagttcatggtattccggggcactaaagtcgaagttcatatagcaactgttatcaacatggcagtaatacttctgcgtgctgacaaacgtaggctgtgggaagaaagtccagtaatagtcgccgcccgcattttctttgcagtcggcctgccaggtgacataggtttgtttgttgcgaccaacgccttgttcactggtccatagcgggaacggtttgccacgcagatcgaagtaggaaaactgttcgccgcagccgtagatatggtcctctggttgagcggcaaggcgcagccagatacggttgtggttaaggttgtcgttttgtagttccagcaataaacgcccctgatcgtcggcagagatattcagcgtggcgctaatgtcagaaccacggctgaaatgaattaaccaaccatccggactctggctgacgatggcgtcggtaagcgcaattttctcctgtagtttatctttaatgctgaaattaccgcggaacatatcgatatccgctataccactgccaatccataaacaaggattatctttgctatgggttaaaataagacgttgttgaaaatgtagggtaaaactgtcgttattctgatgaaattgaaaatctaataactgtggacgtggcgtatccataactaatctccatagagttgagaacgagattgttgccttcctgttattacaggcttatgtaaaatgattctcataaaactgatatataaaaactttacagaagctgagctgtttttaacttaataaattgaagatacataatgttgcctttagcgagtgaaatgttcttcaatgattttgactgctaatcaatacaagttattttctctgtccgtaaatattaaaaaacaggcggtgcggttttccactttccagtaataataagtcgataccactattaaaggcgttaggcgggcaactcataggttcaactgccagtccctgacgctgtaatttttcaccgctataaacctgcacccagagttgatcggaacaaaggcttacgctaagcgcctgctgtggatgggtaatggtcatttcccacaaatcattagcggttttaaaggtgtggtcgatttttgtcgcggctatttttttcgcctgcgtgaaatttaaatccagctcatcaacgtggtgaagcgttgtcggattcgcgtgctcatcgacggcataaacctggtttgccggaagctggaacagatattcatcaacagatgttaagttgcaggttaaataaggatgaatacccacgccataaggcgctgcgacagtgccgatattctggcttgcgatctcaacggaaagacccgtgtgtgcgttgaggctataaacaacttgactagccagcataaacggatagccgtaactgggcggcagaaaagctgtcagggtaacgctggtggcggttaattcactaatttgccagtctcgccaggcaagcagcccgtgaatagcggctttactactatgttcattaatgggtaactgatattcctgcccctgatagcggtaacagccgttggcgatccggttcggccacggaataagcactttacccagatgcgccagcggcatctcttcgggtttgtgcgggatgactaaatgacaaccctgaaaggttaattcagccagaccagcaccgacggtcacaatggtcgcgtgataatcccccgcggcaagactaacggtctgtccactgcaatgcatattggtgatttgcatacaaggcaccttaattaagctcatacagcctcccgtgaggctgatgtcaaacccaaaaactgcaccggacggtcccctcgcccctttggggagagggttagggagaggggaaaacccgcaccctattttcagatcagttatttcgcattaatatccagcagacccgctgcaaccgctggagccatgccgggcgctaacgggatacgcgggatcaccaggcaatgcagcaggtgataaatatcctgtttgccgtcccagactttggtggtgaccttattgtccgcatccagctcctgccaccaggaaccattttcatagtccatcaggtacttaatgcagtactcccaccatgtttgataccaggtttcatactggcgatcgccagtgacggtgtagagcgcgtaggccgtacccattgcttcgacgataggccaacgtacacgttcgcggaccaccggttttccttcccagtcaacggtataaacaatcccgtccgcgccatcgggtgcccaggcatcgcgcacggtggcgttaaacagacctttggcatcttctagcagccatgctggtggttgttcgcaacgggcttccagggcagcatggatgtgcagcattaaacggccccattcgatccagtggcctggtgtacctccgaacgcgcggaagcgatgcgccgggttatctttgttgtaatccggcagcggattccactgggtatcgaagtgttcgttaacgcgataatgattatttctggcgacgtcgtggataatcacggaagccacgcgaatcgcgcgatccagccattttttgtcgtgagtgacgtcataaacaatcaagaaagcttccaccgcgtgcatattggcattgccgccgcggtactcttcggttttgctgaaggcttcgtcccaggattccaggcacatctgctcttcttcgctccagaaatatttctcgataatttcaatggtgtaatcgagcagcttgcgcgcttccgggtgacccgttgtgacggcgctggcggcacccagcagagcaaagaagtgttgatagccctgtttggaggcatccaccacgccctcgtcattcacgcaggcataccagccgccatattttttatcacgcagtgcgccgttcatggctttgataccgtgatcaaccaagctgtaagcgccaggtcgacccatcgccgcagcaacggaataaacgtgcaacatacgagcggtgatccacagatgggtgcccatctcttctttgatttgccctttattgcctaaccagccaaaaccagtcggcactacggaatttttaccaaaatcaaagatgcggtcggtttcctgttccagccaacggttgtggcttagggtgttaaaccatttcattccttttatcctcatcttagcggcgtttagccatcatttcgtcgacgatatcgccaagttgttgtaatttcggtgcgcaaacgtcacgcagcatcagctcgttgtctggtaaaccgacgacgcttgcccagactgcacggcctgccaggaatccgcttgcgcccgccgtcattgccacgcgtacggcacgcgggaacagtttttcgtcgacaccggaagagaggatcacccatggcatattgatatggtcattcagacgttgactagcacagagaagctcttgttgcggacctttgccataaagcggcatttcaactttgtagaggtcagcgccactgtcgcccagctctttggcggcatcgatgatcgcttgttcgcgatcgaatttatcgccacgacgcggtgggcggacgactggctcaatgatgcttaccagaccgtgactgtggcacagttcgttgaactctttcaccatatccagacgttgctgcgcatcttcatcactacgccacagcaccagcagttttaaggctttgccaccgtcttgtttgatctgtagcggattgattttgcggtcaataaccacgctatcgaccggaataccgttgccaggaatgaactcatcggcggcgacaatcatggcgcaacttttggcaatcgcgttttgctcaaccacctggcggtagcagaattgttgatctaccagaatcgcgctggcataagggctgagggcctttgcagcgttaactttgaaatcagttaaaacgctatcggctaccggagcgggtgccccagccgcggcaaacatcatgcgcatggcttcgcgctgatcgaccgccagcatggcaaaaccgccgcttgcgcgcgtaatgtcgttgatggtgtacttattcattcatttattcctttatccagtcgttacatttttactttggcagtcatcccggcactgacacggacctgttccagaatggcggaccagtcctggcgaccgcgacccgctgcgcgcgcctggctataaacctcccgactggcggcccccagcggcattggcacatgcagctggttggcgacatcaagggcgatgccaagatccttatgggcaagatcgatcatgaaggcgggagaaagatctccgctgaggactttgtttggccaggaagtggtgaagtgacctttaccggcggcggtaccgctcatcactttgacggcaacatcgaagggaagattcagggcttcgcacaaaacggcggcttctgcgctaagcgcattgagcgcgatgctcatgtagttgttgatgagcttaacgcggatccccatgcccggaccgccagcgttgatcaactcactgcccatcgccatcaggatcggtgtggcacgttcaacttgttcagcggtgccgccagccagcagtaacagagtaccggtaatggcatttgcagaagtacggcctaccggaacatccatcatgctgaagcctttggcttgcatatcggcaatcaatttatcggtttgcagcggatggatggtggacatatcaatgaccagcgcatcggtagataagccttcgcaaacgccgttttcaccgaacaacacgttgcgcaccagatcgccattcggcaacatggtaatgataaattcggcatctttagcggcctgcgccgggttggcggcgggagtcgcacctttgtctaccagatgccgcacagcttcggcgttcacatcaaagacgcgaagttgatgcccttgctgcaataaattgctcgccattgggctacccatttgtcctaaaccgataaacgcgattgctgccataaccctctcctgaatacagttatgtcactttttgtcatttatgacatgctttgcttgtctgtttttgatcgtatttgtaatttatcgtcaaaaaattgacagccgtcactttttaaacaattggtgaaattaaaatgaacgcatcccaaaatgtttaaggaatgaccatgattcgtgttgcttgtgtaggtataaccgtgatggatcgcatctattacgtggaagggttaccgacggagagcggtaaatacgtggcgagaaattatacggaagttggtggcgggccagcggcgacggcagcggttgcggcggcaaggctgggggcgcaggtcgattttattggtcgcgtaggtgatgacgacacgggcaacagcctgctggcagagctggaatcctggggcgttaacacccgttacaccaaacggtataaccaggcgaaatctagccaatccgccatcatggtggataccaaaggcgagcggataatcattaactaccccagcccggatctgctgcctgacgcagagtggttggaggaaattgatttctctcagtgggatgttgtgctggcagatgtacgctggcacgacggcgctaaaaaagccttcaccctggcccgtcaggcgggtgtgatgaccgttctggacggggacattacgccgcaggatatcagtgagctggtggcattaagcgatcacgcggcctttagtgaaccgggtctggcgcgcttaacgggcgtgaaagagatggccagtgcgctaaaacaggcacaaacgctcacaaatggtcatgtctatgtgacccagggtagcgcaggctgcgactggctggaaaatggtgggcgtcagcatcaaccggccttcaaagttgatgtggtagataccacaggtgcgggtgatgtttttcacggcgctttggcggtggcgctggcaacaagtggggatttagcggagagtgtccgcttcgccagcggtgtagcggcgttaaaatgcacacgtcccggtggacgagccgggatccctgactgtgatcaaacccgatcttttttgagtctttttgtataaaatgccagggtgatggtttttcgaggaattttcatgagccttaccgaactaaccggtaacccgcggcacgaccaactcctcatgctgatcgccgagcgtgggtatatgaatattgatgagctggcaaatctgctggatgtctccacgcagacggtccgccgggatattcgtaaattaagcgagcaaggcctgattacgcgccatcacggtggcgcgggtcgggcttccagcgtcgttaatacggcgttcgagcagcgtgaggttagccaaaccgaggaaaaaaagcgattgccgaagcggtggcagactatattcctgatggtagtacaatatttatcaccattggtacgactgttgagcatgttgcccgggcgttacttaaccataatcatttgcggataatcaccaacagcctgcgtgtggcgcatattctttaccacaacccgcgctttgaagtgatggtgcccggcggtacgttgcgctctcataatagcgggatcattggccctagtgcggcgtcctttgtggctgattttcgtgctgattatctggtaacaagcgttggggcgattgagagcgatggcgcgttgatggagtttgatgtaaacgaagctaacgtggtgaaaacgatgatggcgcacgcgagaaatattctgctggtcgccgatcacactaagtatcatgctagcgcggcggttgaaattggtaacgtggcacaggtcactgcgctctttaccgacgagctgccgcccgctgcgctaaaaagtcgcttacaagacagccaaattgaaatcattcttccccaggaagacgcgtaaatttttgtgaccgttaacctggcttcataccttgccacatagccaaacccatcctttcccgctacagttaatttcttgtggcgcgaaaggaggcaaaaatgctctatatctttgatttaggtaatgtgattgtcgatatcgactttaaccgtgtgctgggagcctggagcgatttaacgcgtattccgctggcaagccttaagaagagttttcatatgggggaggcgtttcatcagcatgagcgtggggaaattagcgacgaagcgttcgcagaggcgctgtgtcatgagatggctctaccgctaagctacgagcagttctctcacggctggcaggcggtgtttgttgcgctgcgcccggaagtgatcgccatcatgcataaactgcgtgagcaggggcatcgcgtggtggtgctttccaataccaaccgcctgcataccaccttctggccggaagaatacccggaaattcgtgatgctgctgaccatatctatctgagccaagatctggggatgcgcaaacctgaagcacgaatttaccagcatgttttgcaggcggaaggttttagtcccagcgatacggtctttttcgacgataacgccgataatatagaaggagccaatcagctgggcattaccagtattctggtgaaagataaaaccaccatcccggactatttcgcgaaggtgttatgctaaaaaccattcaggacaaagccaggcaccgtacccgtccactatgggcctggctaaaactactctggcaacgcattgatgaggacaacatgacaaccctggcaggtaaccttgcctatgtgagcttgctcagtttagtgccgctggttgccgttgtttttgcgcttttcgccgcttttcccatgttttccgacgtcagcattcagttacgtcactttatttttgccaactttctgcctgctactggcgatgttattcagcggtatatcgaacaatttgttgccaattccaacaagatgaccgccgttggggcgtgcgggctgatcgtcaccgcgttattgttgatgtactccatcgatagcgcgttgaataccatctggcgcagtaaacgagcgcgaccaaaaatttacagcttcgccgtgtactggatgattttaacgctggggccgctgctggcaggggccagtctggcgatcagttcctatttgctctccctgcgctgggcgagcgatctcaatactgtcatcgacaacgtgctgcgtatttttccgttgctgttgagctggatctccttctggttgctgtacagcattgttcctaccatccgcgtacctaaccgcgacgcgattgtcggcgcgtttgtcgccgcactcctgttcgaagcaggaaagaaaggtttcgcgctttatatcaccatgttcccgagttatcagctcatttatggtgtgctggcggtgatccccattctctttgtttgggtctactggacatggtgtatcgtcttgcttggcgcggaaattactgtcactctcggggaataccgcaaactaaaacaagcagctgaacaagaagaagacgacgaaccatgattgcattaattcaacgcgtaacccgtgccagcgtcaccgtggagggagaagtgacgggcgaaattggcgcgggacttttggtgttattgggtgtcgaaaaggatgacgacgaacagaaagcaaaccgtctgtgcgagcgtgtgctcggctaccgcatctttagcgatgccgaaggcaagatgaatctcaacgtgcaacaggcgggcggcagtgtgctggtggtttcccagtttaccctcgccgcagataccgaacgggggatgcgcccaagtttctccaaaggtgcaagtccggatcgcgcagaggcgttatatgactatttcgtcgaacgctgccgtcagcaagagatgaacacgcaaacaggacgcttcgctgcggatatgcaggtaagcctggtcaatgatggccccgtgacattctggttgcaggtatgagccagcttccagggttgagtcgggaaacaagagagagtatcgctatgtatcaccttcgggttccacaaacagaagaagaattagagcgttactatcagtttcgctgggaaatgttgcgtaagcccctgcatcaaccaaaaggtagcgaacgcgacgcgtgggatgcgatggcgcatcaccagatggtcgtcgacgagcagggtaatctggtggcggtaggccgactgtatattaatgccgacaatgaagcgtccattcgctttatggccgttcatcccgacgtgcaggacaaagggttaggcacgctgatggcgatgaccctggagagcgtggcgcgtcaggaaggcgttaagcgcgtgacctgtagcgcccgtgaagacgcggtggagtttttcgccaagctggggtttgttaatcagggagaaatcaccacgccaaccaccacgccgattcgccattttttgatgattaagcccgtcgccactctggatgacattctgcatcgcggcgactggtgcgcgcagctgcaacaggcgtggtacgaacatatcccgcttagtgaaaaaatgggcgtgcgcattcagcaatataccgggcaaaaatttatcactaccatgccagaaaccggcaatcagaatccgcaccatacgctgtttgccgggagtttattcagtctggcgacgctcactggttggggacttatctggctgatgctgcgtgaacgccacctcggcggaacgattattcttgcggatgcgcatatccgctacagcaagccgattagcggtaaacctcatgcggtagccgacctcggtgccttaagcggcgatctcgaccgtctggcgcgcggacgaaaagcacgggtgcagatgcaggtcgaaatctttggcgacgagacgccgggtgcagtgtttgaaggcacgtatatcgttctgcccgcgaagccatttggcccgtatgaagagggcgggaacgaagaagagtaactgatggagaggggcggtgctgcctctctcattcaggtcatttatattagtccttggctatttcggttatattaaataagaactctataaatttttattcttcgttggctccatacgtgtcttgctacatcactgttcaggagcatttaaatattatttgtagaactgagtggcaattatcgcagataatgcttaattcatcatcttagttcatgtttgagcgatttttgatagtcaaaaccccctctggtgccatacttttctcataaatatttttaaaatctatagctaacaaatattatgcaaagataatggactagcatcattgtcagtatcattcatttactgctctgtatgttatgaataattatgttgtatgtttgctcttaaaccgtgggaaggaggctataatggttgccaatattaatctcattaaacaagaaagttattctgttgttaatttagaaaaacaactttcccgaactgttaccaacaaaattataacgatgagcaagtaaagaccggttggtggcagtactgaccggtctgtgatgaaagattaatttcaccttaaatcctggtgctgttaggatgctgacgtttttcggctacaccattcagattatgcaaataaatatctctgaatataatatattcatagcacccataattcatcctgggcgataactaaaccatttttgagtaataaatgaaacaactgcaacactcttattatttctggaaaacgcctcgcaaaaacaaaacaacatgcaaaaatccgctttttttaaatgattttccggcgtaattttcgcacatacattaatgagtaatatatgtaaggtattggtaatggcgatgaatacggtttttcttcatttaagtgaagaggcaattaaacggctgaacaagcttcggggctggcgtaaggttagtcgatctgcaattttacgcgaagcggtagagcaatatctggaacgtcagcaattcccggtgcgtaaagcaaagggaggcaggcaaaagggggaggtagttggtgttgatgatcagtgtaaggagcataaggaatgacaaaaatttttcattcttgaatataaaaaacagatgcccttattctggtattaatacaaggctgttttacttgaacttataataactgcaactgttacatcatatctggaaaacgcctcgcaaaaataaaaaatgatgcgtaaatgagctttctttaaagattcggcaagggtacttttctctccatagattcaaaaatgatattggcgagatatttatgaactctctggcaggtatagatatgggcagaattttactcgatttaagcaatgaggtgattaagcaacttgatgatctcgaggtgcagcgtaatcttcctcgtgcggacctattaagggaagcggtagatcaatacctgataaatcaaagccaaacagcaagaaccagtgttcctggcatctggcaagggtgtgaggaagatggtgtcgaatatcagcgtaagctgcgcgaggaatggtaatgggaaaaaatgatgtcaatcagattgctgacaacgtgcgcgttgttcatgccggatgcggcgtgaacgccttatccggcctacaaagtcgtataaattcaatgtattgcagtttattggtaggcctgataagcgcagcgcatcaggcaatcttacgcttgtcatcagtctcatgcccataaccttattgatgtggtggtgggtaaattgaggccaaaccggcactggcggcatagcttgaggtggtaacgcggaatacgagagatggtgtcgtcacaccctatgagctgtaatccgggcgacctgcgccacccggaaaacgtcagagattactctccttcacccggaaacaggaacgggttgatggaactgcgggcatagccttcttgctccattcgtgcgtccagtaccagagaggcgaggtcatctgctacggcttcgatttttggatctttttcctgatagagaattttcaggtaagtgtcgcagtcatcgcagctttcggctttaatcgcggcctgttcgtcatccaggctccagtaatgcagtttgccgctctgctcgcagttgctgcattttacgcgcactacgtgccattcagtttcacacaggttgcagtgcaggtaacgtagcccctgagtggtgccaatttgcaccatgctggacaccggcatagaaccacaaaccgggcaatattgacgttgctcgccgtattcagcgcgggctttgccggggatcagattggccatctgcgcccagtagaggctcagtgcagcccagataaacggcgctttatcgctgctgacggagctgaaatcagaggcaaacagcgcgctggccatatcttccagctcctgagtgcttgccttctccagattctcaatcactgccagcgccgggccgctcatttcaggtttcagctcagcaatcagcgccatcagcagcttttgccagtgcttatcacgcggcagaacgtgaatatccagcgggggcttgccttgtgcgctggcttctttaatgcgcgcagtcagatccatctccagcggatggtcgtacagcaccacttcctgggcgtgggcgataagcgcagcaaagcgcaggtaatcacccagaggattattttctgccagctcgcgcagacgctcggcgcggcggttgtataaattcttgagccgagggaacaataacggcggaatcatatccgccgtacgtttctcgctactacccagctcatcttgcgggattatgcgaatactcattcagctttcttttccgttgtcttgcggacctcacggtaccagcgcgggtgatgtttcttcgcccaggcgctggtaacccatccttccaccatggcggtaatcgtgcctttcacccaaagggcggcgtagatatgcaccatgataaccacaattaacgccactgcggcaaaactatgcagcattaacgcgaatcggatcaccgggatactgaaagcaggcgcaaaataaggacgccagataatcacgccgctcaccagcagcagaaccaggaaaataatcgccgcccagaaaacgcatttctgaccgaagttataacgcccggtgtcacctacttcctcgttgacgacgatcttacgaatattcttcgcccaaaagatatcatcccgattgattaggttgtgatgccagtaacggaaaaacatgatgatgaagctggcaaacataaccacgccgacaaacgggtgcagaattcgcgccagctgcggtgtgcccatgatttgcatcaaccagttgaaggacgggaacaaaaagcccagcccgctcaccgccgccaggatgaagcagaaggcggtgatccagtggttgatacgttccggcgcggtgtagcgcacgatggtgtcacgtcgtttcatttgcgctcctcgtctttctcttcgtgcagattattctcttcctcatccgcacggttcggaccgacacccacgtagtggaagatactggccgcaaaggtagccgcaaagccaacagccgcgagcggtttccagatgcctttccagaatttcacggtttcgctgatttccgggttctccggcaagccatgatacagatttggcttgtcagcatggtgcagcacgtacatgacgtgtgtaccaccgacgcctgccggatcgtacagacccgcattgtcgtaaccgcgggttttcagctcagcaacgcgctcgctcgccagcgttttcatgctctctttcgtaccgaagtgaatcgcgcccgttgggcaggtcttcacgcaggctggttcttgcccaaccaccacgcggtcaacgcacagcgtacatttgtagacgcggttgtcttccgggttgaggcgcggaatgtcgaacggacagcccgcaatgcaataaccgcagccaatgcactgctcggactggaagtcgacgataccgttggcatactgaataattgcaccttccgccgggcacgctttcaggcagcctggatcggaacagtgcatacagccgtctttgcggatcagccattccagtttgtcgttctgctccacttcgctgaagcgcattaccgtccagcttttggcgcttaaatcattggggttgtcgtacaccccaatgttattgccgacggtatcgcgaatgtcgttccactcactacacgccacctgacaggctttacagccgatacaggtggtaacgtcgatgagtttcgccacttcttcctggaagtcccgcgcctgaggcgcgggggtcagaccgttagtcgcggaacgacgaatgatatcttgagattgataagccatatgtcgtctccgttacaccttttccacattcacaaggaaggacttaaactccggcgtctgcgtgttcgcatcaccaacgaatggcgttaaagtattggcaataaagccttttttagctacgccttcatagccccagtgaatcggaataccgatggtatcgatatctttgccgttcgctttcagcgtgcgaatacgtttggtcaccaccgctttggctttgatatagccacggttggaggagactttcacggtatcgccctgggcaatgccaagtttattcgccaggctctccccgatttccacaaactgctctggctgcaaaatcgcgttcaacagcgcgtgtttggtccagtagtggaagtgctcggtcagacgataggtggttccgacatacgggaacttatcggctttacccaatgcttcggcgtcgtctttaaagatacgtgcagccgggttgctgataacgtttggatgcagcgggttagttcccagcggcgtttcaaacggctcgtagtgttccgggaacggaccttccgccatcttatcgagggcaaacagacgccccatgccttcctgctgcatgataaacggcccgacgccgctacccggaggcgctgcgctgtagtccggaatatcccagccggtccacttagtgccgtcccatttcagcaactgacgcttcggatcccacgggttaccctgcggatctgcggaggcgcggttatacagaatgcggcggttaagcggccatgcccatgcccagcccagcgtgttaccgaggccagacggatcggcgttatcacggcgtgccatctggttgccttccggcgtccagctaccggcgaaaatccagcagccacaggaggttgtaccgtcatcgcgcaattgggcgaagctactaagttgttggcctttcttgacgataaccgcaccggttgccggatcggtaatatcggccagcgccttaccgttgctctccatcgccacttcttcactagatggctcatgcggaatggcgtagttccatgtcatgttcagcacctggtccgggttcgcgccaccctgttcggcatacatcttgcgcaagcgcaggaagataccggagaggatctcgccgtcagtcagcgcaatccccggggcgtccgcacctttccagtgccactgtaaccagcgaccactgttaacgatagaaccgttctcttccgcgaagcaggtgcttggcagacggaacacttcggtctggatcttgctgctgtcaacttcgttcagctcaccgtggttctgccagaagttagaggtttcagtgttcagtgggtcgatggtgacgaggaacttcagtttgctcagacaaccgatcactttgtttttgttcgggaaactggcaacagggttaaagccctggcagatatagccattgaccttgccctctttcatcatctcgaagtattgcaggacgtcgtagcctttatcccacttcggcaaccagtcaaagccccagctattttccgccgtcgctttatcaccaaagaaggccttcatcatagagacgaagaatttcgggtagttgccccagtagtttacctggccttccagcagcggttttggcgtgttggcggtaaggtaggtttgcagatcggtctgcttctcgcttggcagcgtcatgtaacctggcaggctctggctcagcagccccaggtccgtcagcccctgaatattggagtgaccgcgcagggcgttaacgccgccgcctgccatccccatattgccgagcagcagctggatcatcgccatcgtacgaatgttttgcgcaccaacggagtgttgcgtccagccgagggcatacaggaagctggcagttttatcgtgagcactggtttctgcgatgtattcgcagactttcaggaacgcgtcttttggcgtaccacagatgttttcaaccacatctggcgtgtagcgggaaacgtgctgtttcagcaagttccacacgcagcgcggatgttgcagcgtggtatcgcgtttggcgaagccgttttcgtccagttcataagtccaggaggatttatcgtacttgcgtttttccgcgtcgtagccggtgaacaggccatcttcaaagccgtaatcctcacgcacgatcaggctggcgttggtataggcttcggtgtattcgcggttgaatttttcattgttcagcaggtacagcaatacgccactcaggaaagcaatgtcagtaccggaacgaataggggcatagtagtcagctaccgccgccgtacgcgtaaagcgaggatcgatcacaatcagcttcgcgccgttgtgaattttggcttccatcgcccagcggaacccgaccgggtgagcttcagcggcgttaccgcccatcaccacgacgaggttggcgttcttgatgtcgacccagtggttggtcatcgcaccgcgaccaaatgttggagcaagacttgctaccgttggtccgtgtcagacacgcgcctggttgtcgaccgcgagcatacccagcgcgcgggagaatttttgcgttaaatagccggtttcgttactgctcgcggaagcacacagcatcccggtggagagccagcggttaacagtcacgccttcggcgttttgcgcaatgtagttagcatcgcggtcttctttcatcagtttggcgatgcgatcaaacgcctcttcccaactgatttgctgccatttatcagaacctggcgcacggtattccggaaacttcagacggctttcggagtggatgaaatccaccaggccagcgcctttcggacaaagtgcaccgcggttgaccgggtgatccggatcgccttcgatatggaagatagatgctttggcgttttttgctccgtcaccgaggctgtacatcaacagcccacagcctacggaacaataggtgcaggtattacgggtttcgcgggtgcgcagcagtttatactgccgggtttccgcgagtgctacgctgggtgcaaaacccagtgccgctgccgtggtgcctgccataccgccagcgcagatcttaaagaactgccttctgctgacctgcatggattgctccttgtttcgacattgtcacgtcccatttacattcgcttgctgcgtgtgcagggagtgggagttatttttctttgcggaaggggccgcaaaggtccagaattggctcaatttccctccatccaggaagggtttgtaacagaataccataatgttggtgtgtgtgttcttatctggttaagagaaagtgaaaaaaacacagcgaaaagaaatcgaaaatgtgacaaatatcacaggtgttcgtcaaattgagttatggcggcgtgatgatttacaacacccacggttagatgaggtcgcggaagaagttcccgttgcgctggtctacaacggcattagccatgtggtgatgatggcgagccccaaagaccttgagtactttgcgctcggttttagcctttccgaggggattatcgaaagtccgcgcgatatcttcggcatggatgtcgttccttcctgtaatggtcttgaagtacaaattgagctttccagccgccgctttatggggttgaaggagcgccgccgggcgctggcgggacgtacgggctgtggcgtatgcggcgtggagcaacttaatgacatcggaaaaccggtgcagccgctaccgttcacccagacgtttgatctcaacaaactggatgatgcattacgtcatctcaacgattttcagccagtggggcaactgactggttgtactcacgccgctgcctggatgttgccatctggcgaactggtcggcgggcatgaagacgtgggtcgccatgtggcgctggacaaactgttaggccgccggagtcaagaaggggaaagctggcagcaaggtgcggtactggtttccagtcgtgccagttatgaaatggtgcaaaagagcgcgatgtgcggcgtagagattttgtttgcggtgtctgccgcgaccacgcttgctgtagaagtggctgagcgctgtaatctgacactggtaggtttttgtaaaccgggtcgggcaacggtttatacccatccgcagcgtttgagcaattaattaaaataagtcctgcgaaatatattaaattgcaggacttattcatttcgtgaattttattattttatttataaacaaaatgcgtgtagtggcgttttcttttttcatttattatgttcactctcttatctatatatttataaggcaattaaatgaaaaggaatttattatcttccgctattatagtcgccatcatgtccctcggtctgacgggttgtgatgataaaaaagccgaaacagaaacgctcccgcctgccaatagtcaacctgccgcaccagctcctgaagcgaaacctactgaagctcccgttgcaaaagcagaagctaaacctgaaacacctgcgcaaccggtggtcgatgaacaagcggttttcgacgaaaaaatggatgtctatatcaagtgctacaacaagttacagatcccggtacagcgcagtctggcgcgttatgctgactggctgaaagattttaaacaggggcctaccggtgaagagcgtactgtttatggcatctacggcattagtgaatccaacctcgctgagtgtgaaaaaggcgtaaaaagtgctgtggcgttaacgcctgcgctgcaaccaattgatggcgtggcggtgagttatatcgatgctgccgtggcgttgggtaataccattaacgaaatggataaatattacacccaggaaaattataaagacgatgcgtttgcgaaagggaaaacgctgcaccagacattcttaaaaaatctggaagcctttgaacctgtagccgaatcttatcatgcggcgattcaggaaattaatgataagcgtcagcttgcggaactgaaaaatattgaagaaagagaagggaaaacattccactactactctctggcagtcatgattagtgcgaaacaaattaataacctgataagccaagataagtttgatgcagaagcggcaatgaagaaagtgtctgaactggaaacgctagtggcgcaggccaaagaagcggataaaggcggcatgaatttcagctttattaatagcgcaggccagtatcaactcgaggctaaaaaatacgttcgccgcatcagagataaagtcccgtactctgactgggataaagagcaacttcaggacgcaaacagtagctggatggtcgaagactctttcccgagagcattacgcgagtacaacgaaatggttgatgactataatagcctgcgttaaacgtttttgatgataaatgcagtgtcggatgcggcgcatccgacacagttcaccccttgtgaagtaactccataaatgcctcatatcctgttaacccggcaataatctccgccggatgctgacacaatatgcttgccagatagctaaatatttttagctcatgacgcgcatcggcggcggcgcaggcgatcaagacatggttaatgacttcgttattcacctcaactggttgggcgagggtaataaaaaatccacgaaaacgtcgctcctgttcgctccagcaatgtgggatggcgaggcgattaacaatcaggttttcaccttcgccttcgcgggcgatgatgcgttgtgcttcatcggcggtaatatggtgttgtgcgactaattgcgcacaaatttgccgggtaatatgttgccagctttcaccgcgtacattgctataatgaaaacttccgggggcagagaaaaaacgctccggctgttggcgaataaatgccgtcgccagaaaatgttttatttgttcgataccggcagccgtaatgatattttttacggtgatgtaattatttaccgcgtcatccagtaaataatggctgttgttaatgatcaataacggctcaatctcttcgcgaatggcaacaagttcgcttaagctacgggcaataattacccgacaatttaaaacatcgcgctcaatggcgagctgattaatagtggcaatcgcgttctggtcgctgagcaaaatgatcggctggcgttcgttttgatgccgctccagcgcacaggcaaaatacaaaccgatcagatcgctgtcgaaaaggggaatatcgagctgttcacgcagtagcgtaataaagtgcagactcatatcaaaggccgcaggccaggcggctttcaggttattcatgctgctctggcggtgctcagcaatccacactggtgcggcaaggcaacgtaataaatgcccggtaatattctcaaccagctgcgcatcaataatattcaaactcgcgatgcccggcaccctttgcagcaacccctgcacattatcggcactaattacctgcgcttgctgatgctgtttctctatcaaacccgtcagggttcttacagcgttatcaccaagaaacagaccgctatgttcaacgatttgttttatctcgtcaccgggatattgcggccactcatcggtcagttgattacgcagggcgtaaatcgccagaatcaggctggagagataatcaccctgcatgagcggccagcggtgttggttgtcgcaggccgtggataaatgctgaaggttgtctcgtgttatgcccgccagcggaattaaaaacggatctttgcgcagcaagttcgccagcaagataacgcgtttctcttctgtctcatcaatgaaatggcccaaaccagggcggctggccaggcaacaagtgcgttcataacgctgttttaaccggggcagacgctctgctacccacgtttctggcaaattaagcgcgctggcgagttgcgcacggggagtgaaagtattcagtaataacagcgccagcagccgatcgtcgttatcgtgcttttgcagcaactgaaaaaagctgcggcgctcgaagatttccagctgatagcccgcactgccactggcgaaaatgcgggctttgccgttaagggtgaagttgagatagtcaatatcacgcaggatggtcctgccactaacgccagtctgttgcgccagctcgccaggcgtgcgcggctgttgctccagcagatcgacaatctttaactggcgttcgtttagcattaatccacctgacggaactggctaaacgcgttgactttctccgcagttaaggtcgtcagaaaaccccgtatcagcgtgagcagagcttcgtaatcggctttactaatcataccgctgttggcgtgcagataacgagttggcagacacagcgcgacaaccggacgcccgccgcccatcacgttgtagcgcccgccatccgtcgcaccggttttcatggtggaaaattgcagcggtaaatcgttatgtgcggcacagctttttaacgctgctaccagtttctggttggggaagtagcgcttgtcaaacagcatcagccccggcccctggcccagtttcagcgggtatttaatgttatcaatgcccggaacatcgcccgctacggcggtatccaacacgatcacgacgtccggtttaatgtgttccgcgctggtttgcgccccgcgtagcccaacttcttcttccacactgccaacgccatacagcgtaatttcgggattattcaccgtctgcaatagttcagccatcattgcgcagccgatgcggttatccaacgccttgccgaccactttatcttcgccccagcaggcaaaattggcttccgggctaataaaattaccaatttccacgccgcgcttttccacctcttcgcgactgttcgcgccaatatcaatgaacatctcatcaaaactcagcggttgttgcttttgcttttccgttaacgcatgaggcgcgacggaaccaatcacaccagggattttcactcccttgtgtgtgcgtatggttacccggtggttgagcatgctctgattccaccagccgccaatggtggtaaaacgcagaaaaccgctctcgtcgatgtgggtgaccataaagccgacttcatccatatgtccgacaacggcaacttttggacctttattccccttacgggcaacaaagctgcccagaccatcgaaggtgatttcattcacgcaaggttccagcgtgtttatcagaatgtcgcgaacttcctgttcatcgccgctgacggcgctggcttcgcacaactgttgcagtaactcaatgttcatggacaagctcctgttgcgcggctttcgctttgcggcgtaaccacaatcctttcaggacgataatgaaactaatgttcagcgcgaggccaatcgccagcaccagataaaagctacccaccgggctcatcaggccgatcagcgggtcaaagatacccaaaccaggtgccagacgtttgattccgaaagcgatcaccagcacgccggtaatgccgcccgccagcgtattggcggtaatcatcggcaacggagctgccagagcgtaaggaatagccggttcggttgcgactgtggcaccgaccacaatggcactactggcagcctctttttcctgtcgggtaaacagtttgggcgcaatgaacgtcgcaagacccgccgcgacgggcggcatcagcgcgacaacgccgacgatggcgtaccagtcataaatgtgtttttccagcagactgaagcagaagaaccaggcggttttattgatggggccgcccatatcgaacgccagcatcgcaccgaccagaaacgctgccgcaaacttcatacttggaggaatggtattcaggaagtggagcagcccgcccatgaggtcggacatcaccggcccgataacgtagtaagtgagcacgccgaaaaccagcagagtaacgaacgggatcagcatactaccgagcagcggttgtaatgctttgccaaggcgcactttgcggaaccagaagacgaaatagccaatcgccagccccagcaccaccgcgccgaggaatcccgcaccgctctgggtgccgagcagcgctttgtcgttcgccagatagcaaaccagaaacgccggagcgaaagccggtttatcggcaatgctgctggcaatataagcgcccatgatggggatcataaaggtgaagccaaggtaaccgatggattcaactacccaggtaaagctcggcgcgcctttgctcatatcggtatacggcaaaccgaactgcaccagcatgttggcaagcgccaccaggataccaccgccgatgacaaacggcagcgccgcagagacgcccgccatcaggtggctcatcacgctaccgctttgcacttcctgtttgccaagcttcacgccgctatctgcggcaaaaagctggctgtttgtcggtaattcgctgaaaatctggtcgatatttttcaacgcctgggagatggcaatctcataaactttcttcccggcaaaccgcgcgcgatcatcaccgctcaggccacgcccggtagcgagaatgacgtaatcggcagcggcaatctcttcgctggataagcggttttcaacgccactggacccttgagtttccacttttatggtatgaccgagagaacgggctttctgttccagggcttccgccaccatgtaggtgtgagcgatcccggcggggcagttggtgatcgcgacaatacgtaaggaactctccatcgccacttccttaactgctgagggtttgatttaacaaggcaagcacctggtcggtatcgccctgttgcagttgatgaataaattccttgtgaataattttgcgacacagtgtgccgatgattttgacctgatcctcttcgccgctttgcggcacgccgaggcagatccagcaattgacgtcttcgccatcgctggctttccagtcaatagcctgcgctttgcgggcgaataatacgaacggttgtttaacgcaggcgcttttaccgtgcggcacggcgacaccggaaccaaatccagtagagtgcattttttcgcgcagcagcagggtttgcaggaactggtgactgtcggtgataaaaccgttttgtaacgctattgtcgccaactgcttcagaacggaataagcgccattgccctgaatattcaggtcaatacagcttgcagtaagagctgccattaatcggactccataaaatatattttaatcaattgtaatggtggagcgattaagtgatgagaggcgatatgtcggtaaacaatgacaatttgagacagagtgaaaggtcagatttgcggagtaatgcacataatggttatttaaataaaccacatgaatcattaatgggttattcattatttttgtgatttactcacaatgtatcagggaaatataacttaccgggagatgtaatatgtttaatttttcaaatcgaaatttaaaatattgtgccggaggcatctctggcacattgggcaattacggcaggtaaaacacttcttgcagctcgctactcaccgggctgttatccgggttagcgggcataacatcggtcatatatttccaccaacgttggcagacatcagtgctggcaaccgcattccagcgttcttcagattcaatctctaccatggcaaacagcagattacgcgctttgtcgagatagatggcgtagttatgcgcaccgtgagatttcagcactgcttccagttctggccagatgggattatgccgacgctgatactcttcgtgggcgtcggggtttacctgcatgacaaaggctttgcggatcatgtttgctccttacagcgccagcgcactggcgagtggcgtaacgccgaaacgcttgccgagcgctatcaactcttcacggctgatggtctgtttcatgccgcccatgctataaaccttcactaatacttgtgcacttttttctgcggtgtcgattaaaccgaaggtttcatccagcgtcggtccgctgccgaagacgccgtggaagggccacaacaccaggctatgtttttgcatctcttgtgcggtcgcctggccgatttcgtccgtgccgggcaccatccacggcaaaatgccaacgccatccgggaataccaccagacactcggtgctgccttcccccagttggcgagtgaagaccgcggtgtcgttttcaagtacataggtgagggcgatcaggttggtggcgtggcagtgcatgatcacccgatctttgccgttggtggctttaatgcgctcgcagtgggaaaggaagtgagccggaagttcggaagtggggacggcttcgttggttaacccccaaagaatgtggtagcccgcgccgtcgctgtcgacttttacgatgcctaagttagccgcaggatcaagctggacgttacggaagaatttgccgctgccggtgacaataaacggtgtatttgccagtaaaggcatgggctggctgagcgggatatagcgcggttgttggtggaaattgtcgtgatatggtgcgatatcggcgtcatccaggcgtagcgtcaggttgccgccgttgcgctcatcccagcctttcagccaggcgtcggtggtggctttgatcattccctggacaaaccaggactgagtaatgttttgcatgttctgtgttcctgtaaattcggtgttgtcggatgcacgacccgtaggccggataaggcgctcgcgccgcatccggcaatcaatgcctgatgcgacgctgtcgcgtcttatcaggcctacaactattgccgacctgtaggcctgataaggcacttgtgccgcatccggcaatcaatgcctgatgcgacgctgtcgcgtcttatcaggcctacaactgttgccgacctgtaggccggataaggcacttgtgccgcatccggcaatcaatgcctgatgcgacgctgtcgcgtcttatcaggcctacaactattgccgacctgtaggccggataaggcacttgtgccgcatccggcaatcaatgcctgatgcgacgctgtcgcgtcttatcaggcctacaactgttgccgacccgtaggccggataaggcgctcgcgccgcatccggcagtgtttacccgcggcgactcaaaatttctttctcataagcccgcacgctctccagccattcgctacctgctggcgtatcgtgacgttggcaatacatttcccagaccgcctgccacggcaagcttttctgctcttccagcagtgccagacgcgcagtgtaatcgcccgccgcttccagcttgcgcagctcagcggtaggttccagcaacgcacgcagcagggcttttttcatattgcgtgtaccaatgacccacgcggcaatgcggttgatagaggcatcgaagaagtcaaggccgatatgcacccggtcaaacagatcgtgacgcacaatctcactggcaattgcctgggtttcatcatccagcagcactacgtgatcgctgtcccagcgaaccggacggctgacgtgcagcagcaactgcggcacatacagcatggcggcggaaatcttgtcggaaatcacttcagtcgggtggaagtgcccggcgtccaggcacagcgcagtctggcggctggtggcataccccatgtaaaactcattggagccaaccgtgtagctctctgcgccaatgccaaacaatttgctctcaacggcgtcgatatggtgcgcagggtttagcttctcgctgatcacctcatccagtgctgccagcagacgctgacgcggggcgagacggtcaacggtgatatctttcataccatccgggatccagatgttcatcacgcttggtgtgccgagttgctcgccaaaataggcgctaacgcgacggctggctttgcagtgatcaatccagaactggcgaatgctgtcgtcggcatgggaaagcgtaaagccatcggcgcttagcggatggctaaagcaggaggggttaaaatccagaccgagctgattggctttcgcccattcaacccagtttttgaagtgctctggtttgatctggtcgcggctgactggcgtatcactttccagatagatggcatgtaaattaagccgtttcggccccggaatcagccgcatagcctgttccagatcggcacgtagctcactggcattacgcgctttgcccggataattgcctgtggcctgaatccccccggtcaggctaccttccgggttttcaaaaccggaaacatcatcgccctgccagcagtgcatactaacgggtaaacgatcaagttggcgcagcgcctcctcgacatcaatccccaccgccgcgaaacgctgtttcgctagctcccaggcctgttccagttgagtggtcatgcgcaaagctcctttgtctgtcgtgtagagtgaatctgcgccacatagtgggcaatttcactgtcaggattaggggtaaaggtggtcagattcgcggtggtgctgacgacctgacggaaatcatccacattgttgagttcatccagcgtcattaactggatgccgatattgccgagcgtgctggcttcaacaggcccggcgatcacccgaataccgcaggcatcggcgcatagctggttgagcagcgtgttctggcagcctccgccgacaatatgcagttggctgaaatcttcaccgcgcagctgcgccagctcatgcaacacatcggcatacagcagcgccagactgtcgaaaatgcagcgcgccagttcagcatcactttccgggatcggttgcgccgtttcccgacacgcagcctgaatttcgctgcacatcgtctcaggattaataaagcgatcgtcattgggattgataatgaagcggcaagccggaagtgcctgtgtcgcggagataagcgccggaagatcgttgatttgctgctcctgaagcactcgctgaagcagccataagcccataatatttttcagcacccgatagcgaccttccgccccgccttcattggtgatgttggctgccagtgccgtgtcattggtaaatggcgtctggctttcgaagcccatcaaactccaggtgccagaagagagataagcagcacgactgccgtttaacgggctggcgataaccgcgctggcggtatcatggctggcaacggcgaccactggaatctcattaccctgcgggcaaatccagtgacctatgacattacccggatgcgtcgggcgaccaaaccaggctttgttggccccgctccacgccagtaggctctcgtcccagtcgtcgctattgatattgaccagttgcgtggtcgtggcgttggtatattcccagttcatcttgccggtcaggcgataactgaagtaatccggcatcagcagagcgtgagcaatgtgtggaataagttcaggttgttgctccgtcagcgcacgcaactgataaagcgtattgaagggcagaaactggatgccgctacgttgataaatatcgcgtttgccgagttgttgttgtgcctgcgccattaggccattggtgcggctatcgcgataagcaacgggcaggcccacacgctgaccctgttggtcgagcagcacaaagtccacgccccaggtatcaatcccaatgctatcgatacgaatcccttcctcgcacaccttgtttaatccaaggcgaatggcactttcaaggctatccacatcccaggtgacatagccgttctgactatgcagcccattgttaaaacgatggatttcgcgcagcgtcaggctgcggcattcacgctcgtaacgcgccagcatcacgcgcccactggatgcgccgagatcgacggcgacacaattgcgaaaggtcataatgtgatcctgctgaatttcattacgaccagtctaaaaagcgcctgaattcgcgaccttctcgttactgacaggaaaatgggccattggcaaccagggaaagatgaacgtgatgatgttcacaatttgctgaattgtggtgatgtgatgctcaccgcatttcctgaaaattcacgctgtatcttgaaaaatcgacgttttttacgtggttttccgtcgaaaatttaaggtaagaacctgacctcgtgattactatttcgccgtgttgacgacatcaggaggccagtatgaccgtattacatagtgtggatttttttccgtctggtaacgcgtccgtggcgatagaaccccggctcccgcaggcggattttcctgaacatcatcatgattttcatgaaattgtgattgtcgaacatggcacgggtattcatgtgtttaatgggcagccctataccatcaccggtggcacggtctgtttcgtacgcgatcatgatcggcatctgtatgaacataccgataatctgtgtctgaccaatgtgctgtatcgcagcccggatcgatttcagtttctcgccgggctgaatcagttgctgccacaagagctggatgggcagtatccgtctcactggcgcgttaaccacagcgtattgcagcaggtgcgacagctggttgcacagatggaacagcaggaaggggaaaatgatttacccagcaccgccagtcgcgagatcttgtttatgcaattactgctcttgctgcgtaaaagcagtttgcaggagaacctggaaaacagcgcaagtcgtctcaacttgcttctggcctggctggaggaccattttgccgatgaggtgaattgggatgccgtggcggatcaattttctcttagtctgcgtacgctacatcggcagcttaagcagcaaacgggactgacgcctcagcgatacctgaaccgcctgcgactgatgaaagcccgacatctgctacgccacagcgaggccagcgttactgacatcgcctatcgctgtggattcagcgacagtaaccactttagcacgctttttcgccgagagtttaactggagtccgcgtgatattcgccagggacgggatggctttctgcaataacgcgaatcttctcaacgtatttgtacgccatattgcgaataatcaacttcgttctctggccgaggtagccacggtggcgcatcagttaaaacttctcaaagatgatttttttgccagcgaccagcaggcagtcgctgtggctgaccgttatccgcaagatgtctttgctgaacatacacatgatttttgtgagctggtgattgtctggcgcggtaatggcctgcatgtactcaacgatcgcccttatcgcattacccgtggcgatctcttttacattcatgctgacgataaacactcctacgcttccgttaacgatctggttttgcagaatattatttattgcccggagcgtctgaagctgaatcttgactggcagggggcgattccgggatttaacgccagcgcagggcaaccacactggcgcttaggtagcatggggatggcgcaggcgcggcaggttatcggtcagcttgagcatgaaagtagtcagcatgtgccgtttgctaacgaaatggctgagttgctgttcgggcagttggtgatgttgctgaatcgccatcgttacaccagtgatagcttgccgccaacatccagcgaaacgttgctggataagctgattacccggctggcggctagcctgaaaagtccctttgcgctggataaattttgtgatgaggcaagctgcagtgagcgcgttttgcgtcagcaatttcgccagcagactggaatgaccatcaatcaatatctgcgacaggtcagagtgtgtcatgcgcaatatcttctccagcatagccgcctgttaatcagtgatattagcaccgaatgtggctttgaagatagtaactattttagcgtggtgtttacccgggaaaccgggatgacgcccagccagtggcgtcatctcaatagccagaaagattaattcgccatgccgatgccgacgatgttagcggcgacaataatcaccacacaaccgaggctcaacaccgttaccggacggcgtcctgcattgttccactctttcagcaccagcccgacgataccgccgcacaatacatagaaactcatatgcagcatccaactgatgtagtcatactgcgccggaatgcgggcgtggccccaggcatagaaaaagaattgcagataccacatcaacccgcccagtgtgctgagtaacacattgtgaatgatcaggctttttgccaggctgaagtcggcttttaggctcaaatccttcacttttgccagacgaataaaacagaaaccgaggttaatgatcgcgccgccgcccatgatgacaacatagcttggcagagcgacatacagtggatcgacgccaagtgcggcagcggcttcatgcatcggttttgcggcgttcatcgcaaaggacatcccggcagagaaaatgccgcacatcaccgccagcaccagcccttttttcagattgaactcttcggctttaatgcccatcttgcgctctttcaactgcccggcgcgagttacaatccctacgccaatcagcgccaccagaacgccgagcaacgtcatgcgtccgccttcggtgctaatcaacacatcgaaattgccgttgataattggcgtcatcagcgtaccgacaatcaacgtaatgccaatggcgatgccaattcccatgctcatgccgagataacgcatggtcaggccgtagttgatattaccgatcccccacatagcgccgaacagaaaaacaggcagtcgcgtagagagactaaagctgctgtaatacgcccagaaattcggtagtaacagggcgctgatggcccacggcagaataatccagctaacaatcccaccgacactccacatggtttcccaactccatttttttacttttttgaacggagcgtaaaaacaggctgcactggccgcgccgatcaaatgccaaaatatccccatcgtaatcgcgttactcatcttcttatcctcatcatttttcgtcgcgtcacatctccgacgagatgagtgtaaaaatcgtgctgtcgattaacctttcgcctgttgccgccgttgtcgatttactggcaatcacggcattaagtgggtgatttgcttcacatctcgggcattttcctgcaaaaccatacccttacgaaaagtacggcattgataatcattttcaatatcatttaattaactataatgaaccaactgcttacgcggcattaacaatcggccgcccgacaatactggagatgaatatgagctataccctgccatccctgccgtatgcttacgatgccctggaaccgcacttcgataagcagaccatggaaatccaccacaccaaacaccatcagacctacgtaaacaacgccaacgcggcgctggaaagcctgccagaatttgccaacctgccggttgaagagctgatcaccaaactggaccagctgccagcagacaagaaaaccgtactgcgcaacaacgctggcggtcacgctaaccacagcctgttctggaaaggtctgaaaaaaggcaccaccctgcagggtgacctgaaagcggctatcgaacgtgacttcggctccgttgataacttcaaagcagaatttgaaaaagcggcagcttcccgctttggttccggctgggcatggctggtgctgaaaggcgataaactggcggtggtttctactgctaaccaggattctccgctgatgggtgaagctatttctggcgcttccggcttcccgattatgggcctggatgtgtgggaacatgcttactacctgaaattccagaaccgccgtccggactacattaaagagttctggaacgtggtgaactgggacgaagcagcggcacgttttgcggcgaaaaaataatcatttgccgcctgctgcaatgaggcgtataggccgcatatcagcttaaaaaatgaaccatcgccaacggcggtggtttttttgtgatcaatttcaaaataaaaacaatgatccgataaaaataaaacagcgtttcaattgatgtggttttgatcacttttattgattaaatgaatgtctatcttcgtttccatcaacactgatgctccattgaggaattacgcatcagcccttaaaaatatgccgacaggtgatggaaatgcagataaaacgcagcattgagaaaatcccggggggggatgatgctcgtcccgctattccttggcgcactgtgccacaccttcagcccgggggcggggaaatattttggaagtttcaccaacgggatgattaccggtacggtgcccattctggcggtgtggtttttttgcatgggggcgagtataaaattaagcgcgacgggaacggtactgcgtaaatccggtacgctggtggtaactaaaattgccgtcgcgtgggtggttgcggcaattgccagccgtattattccggaacatggtgttgaagttggattctttgccggacttagtacgctggcgctggtggcggcgatggatatgaccaatggcggactttacgcttccatcatgcagcagtacggcacaaaagaagaagctggggcatttgtgttgatgagcttggagtccgggccgctcatgacgatgattattctgggcactgccgggattgccagctttgaaccgcatgttttcgtcggcgcagtattaccgttcctggtgggctttgccctggggaaccttgaccctgaattgcgagaatttttcagcaaagcggtgcaaacgctgattccattctttgccttcgcgctgggcaataccattgatttgactgtgattgcccagactggtttgctggggatcctgttgggtgtggcagtaattatcgtgaccggtattccgttgattatcgccgataaattgattggcggtggcgatggcactgccggaattgccgcttccagttccgcaggggccgcggtagcgacacctgtgctgattgcagaaatggtgcctgcgtttaaaccgatggctccggcagcaactagcctggtagcgacggcggtcattgtgactagcattctggtgccaattcttacctctatctggagtcgtaaagtcaaagccagagcagcgaaaatcgaaattttaggtacggtgaaataaacctgcttccttaatccccacagccggatgaactaacgttcgtccggtttgctattgagttcctgcctggatacttaccgcgaaaacagcacgcctgacataaaataaatatggtctaatggggaaatttctcgtggagagggaacagatgcgatatccggttgatgtatacacaggcaagattcaggcttatcccgaaggcaaacccagcgcaattgctaaaatccaggttgatggtgagttgatgctgacggagctggggctggaaggtgacgagcaggcggagaaaaaggttcacggcgggccagacagagcgctgtgtcattatcctcgtgagcattatctctactgggcgcgggaatttccggaacaggcggagttgtttgttgcgcctgcgtttggtgaaaacctcagtaccgacggcctgacggaaagtaatgtttatatgggcgatattttccgctggggagaggcattaattcaggtcagccagccgcgcagcccttgctataaactcaattaccattttgatatcagcgatatagcgcagttgatgcaaaacacaggtaaggtggggtggttgtatagcgtgatagcgccagggaaagtgtctgcggacgcgccgctggagttggtttcccgtgtcagcgatgtgaccgtgcaggaggctgccgccatcgcatggcatatgccgtttgatgacgatcaatatcaccgtttactctccgctgccgggttaagcaaaagctggacgcggacgatgcaaaagcgccgactgagcggcaagatcgaagatttttcccgccggttgtggggaaaataacccccggagtgtaggcctgataagacgctatcagcgtcgcatcaggcatcctgctcaaatgccggatgcggcgtaaacgccttatcctgcctgcaaatgcgaagtttaactccgcttatacagcggcaaccaaatcaccagccgtaaaccgcccagcgggctgtcttctgccttcacccagccacgatgctgctgaatggcggtttcaacaatcgccagccccaaacctgtaccgccagattcacgatcgcgtgcttcatcggtacgatagaacggacggaaaatctgttcgcgatcttccgggctaacgccaggaccatcgtcgtccaccgtaatggtgataccgtctttatctaccgcaaagcccacttcaatcttcgtatgggaataacgcagagcattacgaacaatgttttccagcgcactttccagggcgttcggattgccgtacagcggccacggcccaggcgggaagttaactgtcaagctcttgcccatttgctcggcttcgaacgccgcgttatccagcacttcactccacaactggttggctttgatggtttcgctaaccagcgcgtttttttgctgattacgactcatcaccaacagatcgttgatcatgctgtccagacgttgcgcttcggtttcaatacgctccagttccttgctttcaccgctacgacggcgcagtaacgccgtacccagttgcagacgcgtcagcggggtgcgcagctcgtgagagatatcagaaagcagacgctgctgagaggtcatcatgcgctccagcgcggtgaccatctggttaaaactggcacctgcggcaaggaattcctgtggccccgcttccagttccgggtgctggcgtaagtttccctgggcaacttcatcggcagcgtttttcagcttacgcgccggttttgccagactccaggccaaccacaacagcagcggcgtactgaccaacatggtgacaatcagcagtaatagcgggcggtcaaacagtaagttaatgaaatcggattgagaactgctggccggacgaatcagataaagttggtaattatcttcgccatcacgcacggagaacggaccgaccagttccacgcggccatactttttcttctgcggatgatcggcgttatcggcctgaccaataaagttacgaatgatctgcatttcgctgcgttcagcgccgatcacgcggccttcggtggtcaccaataacaaacgctgtcctggcggtgcccacttatcaatcgcccggaacagacgccgccaccacattaaatcgttgggcggatcgttcgccagctccgcttcgacatgctgctcaatcatcagcccctgacgctgttcgctatccagaagctcggtcatctggcgactatcgagcttgggtaacatcaaaaccaacatcaacaccagcgccagcgtcagccagaagatggcgaagatgcgcgcggttaagctgcctatcatgaagcagaaaccatcagatattagctcaactagcagaaaccatcagatagccgcgaccacgcaaggttttaaaccacgggtgaccatctttacgatccggcagtttacgacgcaggttggaaatgtgcatatcaatagcgcggtcgaaaggcgtcaggcgtttgcccaacacttcctggcttaaatgttcacgggaaaccacctgacccagatgctgtgccagcaaatagagcagggtaaactcagtaccggttaactccagcgtttgcccgtcgaagctggcttcctgacggcctggattcagcactaaggcatcaacttccagtgtcggactaccgttgtcgttgttttgctgttgctcgctccagtggctacggcgcaggatcgcgcgaatacgtgccaccagctcacgatcattaaacggtttcgggagatagtcatctgcgcccagctcaaggccgagaacgcgatcaagttcactgccgcgcgccgtcaacataatgacaggcgtctggtgtgtctggcgaagtgcttttaatgtgtcgataccatttttcttcggcatcattacgtcaagcaaaagtaaatcaatgctgtcgtccagaagatcaagcgcctgttccccatcgtgggcaacaatcacgttgaagccttccatctcgagcagctcctttaatagggaagtcagctctcggtcatcatcaactaacaggattttattcattgtttaaatacctccgaggcagaaattacgtcatcagacgtcgctaatccatgactttacgttgttttacaccccctgacgcatgtttgcagcctgaatcgtaaactctctatcgttgaatcgcgacagaaagattttgggagcaaatgatgcgcatagttaccgctgccgtcatggccagtacgctggcagtcagtagtttaagccacgctgctgaagtcggtagtggcgataactggcatccgggtgaagaacttacgcagcgcagtacgcagagccatatgttcgacggcataagtttaaccgaacatcagcgtcagcagatgcgagatcttatgcaacaggcccggcacgaacagcctcctgttaatgttagcgaactggagacaatgcatcgccttgtcaccgcagaaaattttgatgaaaacgctgtgcgcgcacaggcagaaaaaatggcgaatgagcaaattgctcgtcaggttgagatggcaaaagtccgcaaccaaatgtatcgcctgttaacgccggagcagcaagcggttttaaacgagaaacatcaacaacgaatggagcagttgcgtgacgtgacgcaatggcaaaaaagtagtagcttgaagctattgagtagtagcaacagtcgttcccagtaataaaccctgttttccttgccatagacaccatccctgtcttcccccacatgctgtgggggtttttttatcctcaatttgcctgctgcttaatgcattgcagatgatttgcttccgttatactagcgtcagttgatagcgggagtatttatgaatcaatcttatggacggctggtcagtcgggcggcgattgctgcgacggcgatggctagcctgctattgctgattaaaatttttgcatggtggtataccgggagcgtgagtattctcgccgcgctggtggatagcctggtggatatcggcgcgagcttgacgaatttattggtggtgcgatattccctgcaacctgccgacgataatcacagctttggtcacggtaaagctgagtccctcgcggcgctggcgcaaagtatgtttatctccggtagcgcactattcctgtttttgacgggtattcaacatctgatatctccaacaccgatgacagatccaggcgtcggggttatcgtgacaattgtggcgctaatttgtacgattatccttgtcagctttcagcgttgggtggtgcggcggacgcaaagccaggcggtgcgggctgatatgctacattaccagtctgatgttatgatgaacggcgcaattctgctggcgctggggttgtcctggtacggctggcatcgcgccgatgctctgtttgcattgggaatcggcatctatattttatatagcgcgttacgcatgggatatgaggcggtacagagtttactggatcgcgcattgcctgatgaggaacggcaagaaattattgatatcgtgacttcctggccgggtgttagcggcgctcacgatcttcgcacgcggcagagtgggccgacccgctttattcagattcatttggaaatggaagactctctgcctttggttcaggcacatatggtggcggatcaggtagagcaggctattttacggcgttttccgggaagcgatgtaattatccatcaggacccctgttccgtcgtacccagggagggtaaacggtctatgcttagttaatcagtataaaagagagccagacccgcattttgtgtataaaataccgccatttggcctgacctgaatcaattcagcaggaagtgattgttatactatttgcacattcgttggatcacttcgatgtgcaagaagacttccggcaacagatttcattttgcattccaaagttcagaggtagtcatgattaagaaaatcggtgtgttgacaagcggcggtgatgcgccaggcatgaacgccgcaattcgcggggttgttcgttctgcgctgacagaaggtctggaagtaatgggtatttatgacggctatctgggtctgtatgaagaccgtatggtacagctagaccgttacagcgtgtctgacatgatcaaccgtggcggtacgttcctcggttctgcgcgtttcccggaattccgcgacgagaacatccgcgccgtggctatcgaaaacctgaaaaaacgtggtatcgacgcgctggtggttatcggcggtgacggttcctacatgggtgcaatgcgtctgaccgaaatgggcttcccgtgcatcggtctgccgggcactatcgacaacgacatcaaaggcactgactacactatcggtttcttcactgcgctgagcaccgttgtagaagcgatcgaccgtctgcgtgacacctcttcttctcaccagcgtatttccgtggtggaagtgatgggccgttattgtggagatctgacgttggctgcggccattgccggtggctgtgaattcgttgtggttccggaagttgaattcagccgtgaagacctggtaaacgaaatcaaagcgggtatcgcgaaaggtaaaaaacacgcgatcgtggcgattaccgaacatatgtgtgatgttgacgaactggcgcatttcatcgagaaagaaaccggtcgtgaaacccgcgcaactgtgctgggccacatccagcgcggtggttctccggtgccttacgaccgtattctggcttcccgtatgggcgcttacgctatcgatctgctgctggcaggttacggcggtcgttgtgtaggtatccagaacgaacagctggttcaccacgacatcatcgacgctatcgaaaacatgaagcgtccgttcaaaggtgactggctggactgcgcgaaaaaactgtattaatgatttcggaaaaaggcagattcctttaccctgaaaccgatgacagaagcaaaaatgcctgatgcgcttcgcttatcaggcctacatgaattctgcaatttattgaatttgcaaacttttgtaggccggataaggcgttcgcgccgcatccggcatggacaaagcgcactttgtcagcaatatgaggcggatttcttccgcctttttaatccctcaacatatacccgcaagttatagccaatctttttttattctttaatgtttggttaaccttctggcacgctttgctcatcacaacacaacataagagagtcgggcgatgaacaagtggggcgtagggttaacatttttgctggcggcaaccagcgttatggcaaaggatattcagcttcttaacgttagttatgatccaacgcgcgaattgtacgaacagtacaacaaggcattcagcgcccactggaaacagcaaactggtgataacgtggtgattcgtcagagtcacggtggcagtggtaaacaagcgacgagcgtaatcaacggtattgaagctgatgttgtcacgctggctctggcctatgacgtggacgcaattgcggaacgcgggcggattgataaagagtggatcaaacgtctgccggataactccgcaccgtacacttccaccattgttttcctggtacgtaagggaaatccgaagcagatccatgactggaacgatctgattaaaccgggtgttagcgtgatcacgcctaatccgaaaagctctggtggcgcgcgctggaactacctggcagcctggggctacgcgctgcatcacaacaacaacgatcaggcaaaagcacaggattttgttcgggcactgtataaaaacgtcgaagttctggattctggcgcgcgtggctccactaacacttttgtcgagcgcggaattggcgatgtactgattgcctgggaaaacgaagctctgctggcagcgaatgaactggggaaagataaattcgaaatcgtcacgccgagtgagtctatcctcgcagagccaaccgtgagcgtggtcgataaagtggtcgagaaaaaaggtactaaagaggtggcggaagcctacctgaaatatctctacagcccagaaggtcaggaaattgccgcgaaaaactactaccgtccgcgcgacgctgaggtggcgaaaaagtacgaaaatgcgtttccaaagctgaagttattcaccattgatgaagagttcggcggctggacgaaagcgcaaaaagagcattttgctaacggcggtacgttcgatcagatcagcaaacgctgatttccccaggataattatcaaacccggtggtttctcgcgaccgggttttttatttgtcacgattttgcgttacccttgcatctctttgaggtacagggaaaaaaagatgaaaaaagcgggtcttctttttttggtgatgatagttatcgccgttgtggctgccggtattggttactggaaattaaccggtgaagagagcgatacattacgtaagattgtccttgaggaatgtttgcccaatcagcagcaaaatcaaaatcctagcccatgtgcggaagtcaaacccaatgccggatacgtggttttaaaagatcttaatggcccactgcaatatctgttgatgccaacgtatcgtattaacggtactgaaagtcctttgttgaccgatcctagtacgccgaacttcttttggttggcttggcaggcgcgtgattttatgagcaaaaaatacggccagccggttcccgatcgcgcggtttctttggcgatcaactcccgcaccgggcgtacgcaaaaccattttcatattcatatctcttgtattcgtcctgatgtgcgcaaacagctggataacaatctggcgaacatcagcagccgctggttgccactgccaggtggtttgcgcgggcatgaatacctggcgcgtcgggtaacggaaagcgaactggtacaacgcagcccatttatgatgctggcagaagaagtacctgaggcgcgggaacatatgggacgctacgggctggcgatggtacggcagagtgataacagttttgtattgctggcgacacaacgaaatctactgacgcttaaccgtgctagtgccgaggaaattcaggatcatcagtgtgagattttgcgttaaggcgaagagttaaggaaagtaagtgccggatatgaaatccggcacctgtcagacttaagcctgtttagccgcttctgcagctttaacgattactgcgaaggcgtcagctttcagagaagcaccaccaaccagcgcgccgtcgatatccggctgagcaaacagttctgcagcgttagacgcgtttacagagccgccgtactgaatgatcacttgttcagcgatgttagcgtcaactttagcgatgtggtcacggatgaatttgtgaacagcctgtgcctgagccggagttgcagatttgccagtaccgattgcccatacaggttcgtaagcgataaccgcaccttcgaatgccgcagcaccctgagttttcagtaccgcgtcgatctgacgtgcgcaaacttcttcagttttgcccgcttcattttcagcttcggtttcaccgatgcacagaaccggagtcaggccctgctctttcagcaccgcgaattttttcgcgatcagttcgtcagattctttgtggtaagtacgacgttcagagtgaccgatgatgatgtactgtgcgccgatgtctttcagcatagcagcagaggtttcaccggtgaatgcgccggacaggttcaggtccacgttttgcgcacccagcatgatgtggctgccttcagcttcgcgcttcgccatatcgatatacatttccggtggtgcgattgcaaccgcacagccagcaacacctgccagctctttacgcaggttagaaaccagctcgtgaaccatgtggcggctgccgttcagtttccagttacccatcactaaaggatgtcgcattttaattctccacgcttataagcgaataaaggaagatggccgccccgcagggcagcaggtctgtgaaacagtatagagattcatcggcacaaaggctttgctttttgtcatttattcaaaccttcaaggctttcagatagcgccagcttaatcggttcaacagcgaaggtcagccccttttcgccgttgtccgcgacaacataacgcagtgcaccttctgtctcggtgtaataacgtttgtttttccccgccgttagtaggctctgcagttttttctggctttgtgttttggtcattaatggggtgagtgtgcggatcaccgctgccatgtattcctgagctttcgctttcgcggctttttgctctggcccctggatgggtagccaggtcatttgaatgcttttgatttttaaggtaccgcgctccagcgctgtagaagcatacaagttctcattaattttacttgcagcacgagtgagattggctttgtcgggactgctgtcgatggcacgaaattcgttcagtggcaggctgggattctggctgttaaagtcttctcgaaactggctgatggagagatcgaaagtaggggctccagccagcagataaggcgcggtcgttgccgtatctggtgtttgtgcatgcgcctctgttgtaacggttaatgcagaacataagagaaaaaacagcgtacaccctggcttcattgacagtaccttttgttatgactggctccgattaaaacgatatctgtcgcccttgtcaaaagggtagaatcctggaaaagacaaccatcaaggaacttacatgaccatacagcaatggttattcagttttaaagggcgtattggacgccgtgatttctggatttggataggcctgtggttcgcaggcatgctggtgcttttcagtctggcgggtaagaatctactcgatattcagaccgcggcgttttgccttgtgtgcttgctctggccaacagcggcagtaactgttaagcgcttgcatgatcgcgggcgttccggcgcatgggcatttctgatgattgtggcgtggatgctgctggcgggtaactgggcgattttaccgggtgtctggcaatgggcggtggggcgttttgtcccgacgttgattctggtgatgatgcttatcgatcttggtgcgtttgttggcacacaaggcgaaaataaatatggtaaagatactcaggatgtgaagtataaagccgacaataaaagtagtaattaacctttaatatatctcttactgctatttttttccgggattgttatttccacgatgcaaatgacaatacccggaaaatccttctgaactcttcaccttaagcaatatcaaaaaaaatggtaatccataagatcattacttgtttgttcttcccttaacggcgcattattcttaagtcgtaatcgacagagaggcgaatatacagaggtgccctatgaaagatgtcgtagataaatgcagtactaaaggatgtgcgattgatatcggtacggtgattgataacgacaactgtaccagtaagtttagccgcttttttgccacccgcgaagaagcagagtcttttatgaccaaactgaaagagcttgccgccgctacatcctctgcagatgaaggggccagcgtggcctataagattaaggatctggaggggcaagttgagcttgatgcggccttcactttcagttgccaggccgagatgattatttttgagttaagtctgcgtagcttagcttgatggagttgctttagaaggagttaaacatggcttataaacacattggcgtggcaatttccgggaatgaagaagatgccttactggtgaataaagccctggagctcgccagacataatgacgctcacctgacgttaattcatattgatgatggcttaagcgagttgtatccgggtatctacttccctgcaacagaagatattcttcaattgttgaagaataagagcgataacaagctgtataaactgacgaaaaatattcaatggccgaagacaaaactgcgtattgaacgcggagaaatgccggaaacactgctggaaattatgcaaaaagagcagtgcgacctccttgtctgtggtcatcatcacagttttatcaaccgtttgatgccggcatatcgcgggatgatcaataagatgagtgcggatttgctcatcgtgccgtttatcgataagtaaccgcttaccagtaatgctccgctgtcatatggcccggtcggcgacgtaaatgtttcgtcatctgccgggtctctttcagcaactgttgtgtatcgcgcaccatctgtggattgccgcacagcatcacatggctggtttctttattcatcggcaggccaatcgtgctttccagttccccactttcaattaatgccggtatccgtccggtgaggctccccgctgccgtttcccgactgaccaccgtctgaatgcgcagttttccttcgtagcgtttttccagttcctgcatcagtggcaaatagcttaagtcggcggcataacgtgcggcgtgcaccaggaccagatttttgaagcgatctaaatctttacctagttgcagaatgcttaaataagggccaatcgctgtaccggttgccagcatccatagcgtttcgcagtgcggcacttcatcgagcacaaagaatcctgccgcttcgctaaccacctgcacttcatcgcctggtttcagtgccgccagtcgtgggcttaatttgccatcggggacggtgaccaggtaaaactccagatcgggattatcggggctgtttacataggagtaggcgcgctggacgcgttcgccgtcgatttcaaggccaagcttggtaaattgcccggcggtaaacggaagcacgggggcgtgaacggtgagactaaacagggcgtcggtccagttctgcactttagtgactttgcctgttacccaatcagccatgtttttctcctgttttgattgacttgccttatcttcgttctccgaacaaaaaaattccagtcccgaaggactggaaggctcaatcgatcaaatcaatcagaggatgtgcacctgcatttccgggtctttgcgatccagatagtggatggactgaatgcggcgaatggtgcgactcttgccgcggatcagcagcgtttcggtagtcgcgatattgcctttgcggctaatgccttccagcagatcgcctttggtaataccggtggcagagaagatgacgttatcgctgcgcgccatatcgcccaggcgcaatactttaccggcttcgatgcccatcgctttgcagcgtgccagctcctgctcgccaatgcgacgattctcttcgttgtcgcctttgacgtcatgacgcgccagcagacgaccgttcatgtcgccatctaatgcgcggatcaccgccgcagaaactacgccttccggcgcgccaccaataccgtacagcacgtcaacttcgctgtctggcatacaggtgagaatactggccgcaacgtcgccgtccggaatagcaaatacgcgtacgccgagttgctgcatttcagcgataacggcatcgtggcgtggtttagccagaatcgttaccgtcagttcgctcaacggtttgccgagcgccgccgctacattgcgcaggttatccgccagcggcaggttcagatcaatggtgcctttggctcccggcccgacaatcagcttctccatatacatatccggcgcattgaggaagcagcctttatcgcctactgccagcaccgccagcgcgttagcctggcccatcgccgtcatgcgcgtgccttcaatcggatcaacagcaatatctaccgcgtcgccgcgaccagtaccgactttttcaccaatgtagagcatcggtgcttcgtcgatttcaccttcaccaatgacgatggtgccgtcaatgttgacctggttgagcataatacgcatggcgtttaccgccgcgccgtccgcggtgtttttatcgccgcgtcctaaccatttgtagccagccagcgccgcactttcggtgacgcgggaaaattcgatggcaagttctcgtctcatagcaaactctaagcagtaaggaatggcgcgaagtgtagcacaggggaagggagggattattgatgtgtgcggggttgcccccgcacgtttcgggactaccggatgcggcataaacgcttcattcggcatttacattattcgtcgtgttcttcccacgccatcgcgcgtttaaccgcttttttccagcctgcgtaacggtaattacgctcagtggtttcgatgcctggacggaactcgcgctcaatcaccgctttctcttgcagctcgtcgaggttctgccagaagccaaccgccaggcctgcgagataggccgcacccaatgcggtgacttcgcgcacttccgggcgctcaacgcgggtgccgagaatatcggactggaactgcatcaggaaattgtttgctactgcgccaccatccacgcgcagggcgtgcagacggataccagagtcggcctgcatcgcttccagcacgtcacgcgtctgataagcaatagactccagcgtcgcgcgtataatgtggttagcgttcaccccacgagtcagaccgaaaatcgccccgcgcgcatacgggtcccagtacggcgcacccagcccggtaaatgccggaaccacatacacaccattggtgttttgcactttggtggcgaaatattcggaatcgtaggcgtcgttaatcaacttcatttcatcgcgcagccactgaatggatgcgcctgccataaacaccgcaccttccaacgcatagttcacttcgccagtcgggccgcaggcgatggtggtcagcaggccgttttcacttttcaccgctttctcgccagtgttcatcagcataaagcagccagtgccataggtgttcttcgccatcccttctttcacgcacaactgaccaaacagcgcggcctgctggtcaccggcgatcccggagattggaatacgcgtgccgcctttgccgccaatgttagtctgaccgtatacttcggaagaacgacgcacttctggcagcatctcgcgcggaatatccagcacttccagcattttgtcgtcccagtccagggtatggatgttgaacaacatggtacgagaggcgttggtgtaatcggtcacatggacacggccctgagtcattttccagataagccacgtatcaaccgtaccaaacagcaattcaccacgacgtgcacgctcgcgagagccttccacatggtcgaggatccacttcactttggtgccagaaaagtacgggtcaatcaccagaccggtattgctgcggatataatcttctaaaccgtcacgttttaaatgctcgcagatttctgcggtacgacggcactgccagacaatggcgttatagataggcttgccggtttctttttcccagacaatagtggtttcacgctggttcgtaataccgatagctgcaatttgatcggaactgatatcggctttcgccagcacttctaccagcgtggagctttgggtggcccagatttccattgggtcgtgttctacccaacctggttttgggtagatttgctcaaattcgcgctggctcacgctaatgatattggcatcgtgatccattacgaccgcgcgggagctggtggtgccctggtcgagcgcaacgatatattttttttcagtcatgtttaattgtcccgtagtcatattacaggctagctttttgttcactaggagttgtggtttccttttcttccacaacacagatatcgcaaggcaaatggcgaccaatcagtttgcggtaggcaaatgcacctacaatcgcgccaacgatagggccgaaaagcggcaccaggaagtaaggaatgtctctgccgccggtaaaggcgacattgccccagcccgccagccaggcaaagactttcggaccgaagtcacgcgctgggttcatggcaaaacctgtcaatgggcccatagatgcgccaatgaccgcaatcagtagaccaatcagcaagggagccaaagggccgcgtggtacaccgttgccatcgtccgttaacgccaggatcagccccatcagaatagcggtaatcaccatctcaactgcgaaagcctgcacaaaattgatatgaggattagggtaagtagagaaagtgccagccagatcaacactttcaacgctgccgcgaacaatgtgatgagtctgctcgaagtcgaaaaataaattgtagtaaagcccgtaaactaaagccgcagcacagaaagcgccggcaacttgactaacgataaaaggaataactttgcgcttgtcgaaacaggcaaacagccacaatgcaatggtaacagcgggattaagatgcgcgccggaaacccctgcggtcaggtagatggccattgccacccccagtccccaaatgacactgatttcccactgaccaaaagacgcaccagcgacttttagtgctgcaacgcaacccacaccgaagaaaatcaacaacccggtaccgaggaattcagcaatgcactggcctttcaaggtacttgtttgactcataatcggatcctgaagagttaatgtttgttgtatgcgtgaaagtcacggacctccacgatgcttgtaggcatgctgtaaacttatcgttaacgagcaaaaacgagaaatatcgaacttaaaatgtgtgtgcctcgtcataaaatgagcgttatcgcgccatttattccatctgattgtacatgatgcatgtttgttagatcattcgcgcaacaaatttattaacattttcgattgatgtggattatgtcaccaggagaaggatgaaaagtgtggcaaaccgtaatctgcaaggcgtgccgctggacagcgatggcgcggcttcatacaatcggagctaactaaagtgcgctcgtatttattaaggcgtcaccggtaatcgggacgaggatttttatccatcaacgccttgcaattcaggagaggtatgacaatgagtttagaagtgtttgagaaactggaagcaaaagtacagcaggcgattgataccatcactctgttgcagatggaaatcgaagagctgaaagaaaaaaacaacagtctgagccaggaagttcaaaatgcccagcatcagcgcgaagagctggagcgtgagaacaaccatctgaaagaacagcagaacggctggcaggaacgtctgcaggccctgctgggtcgcatggaagaggtctgattacgcttcatcttccgcgtaatttctttactgtgtaggccaacaggtaacgcagaaaaaaggcaccttgcggtgcctttcttatcattcaatatccagcggatcttcactaagaataatcccggtattgtcggcataaagatggtcgccggagaagaaggtgacaccgccaaaattgacgcggacatcgctttcgccaatgccttcgccagcggcaccaaccggaattgccgccatcgcctggatgccgatatccaactcttccaggtcatctacctgacgcaccgcgccgtaaatgaccagaccttcccattcattttgtactgccagacgcgccagttcagcatcgaccagtgcgcgacgaacagaaccaccgccatcgacgacaagaacacgaccacggccattctgttcgagcagatcgtacagcaacccgttgtcctcgaaacattttaccgtgattatttgtccgccaaagctcgcccgtccgccaaagttggagaacagcggttccacgacgttaacatcttcttgatagatgtcacaaagctcggaagtatcgtatttcataggcttaacattcagttgctgcgagaattttcagtatatcgcgctatgtgggctgttggcaaaatcatcaattgttaattgatatttgtcagttatgctgcccactggcttaggaatatccctaaaacaaacagcaggttagtcagtaacgctcccttgacagtacgttccagcattggtcgcatcgccaccgggtccatttcccgcatcacataacgggcttgcttcaccagtaatggtgccgccagcaggaacagccagccccacaggctatgcaggctaaagagattaaacagcgccagacacaccaggctgcccatcagcaggcaggcatgataacgacgcgcgttcacttcacctaagcgcaccaccagcgtgtttttgccattttcgcggtcgctattgatatcacgcaggttattaatattcagtactgccgttgccagcaggccgcatgcggtcgccggaaggatcagtgccggaatcaatgtatgagcctgtaaataccagctccccatgacactcaaccagccaaagaaaaccagtacggaaatatcacccagaccgatataaccataaggacgattgcccacggtgtaggtgatagcggcaatgatgctcaacccgccaagaatcaggaaaccgacaaaatcggccagcgtatggcatgccactgcaaccagtgccagcccggagagacagatgagcacgacggtaataatgagcgcccgtttcatctcttgctgggtaatgacccctttttgcatgccgcgtagcggcccaatgcggtcaggtttatcgctgccttttaccgcatcgccgtaatcattggcgaggttagaaaggatctgtaatagcccggcggtaattagtgccagcagggcgaccagcggatcgaagtgaccttgccaccatgccagcgctgtcccgacgataattgcagcaaaggcgagggggagggttttaggtcgtaaactttccagccacgcctgagttcggctaatttgttgttcagtcataatacgcgccaataaaaatggggcctttcagccccatcaaacaatgatgaaaatgattgaacgcgattataggataaaacggctcagatcttcatctgccaccaacgcatccagatgtttgctcacataatctgcgtcaatagtgatattttgaccgcttaaatcgctggcgtcgtaggaaatctcttccattaaacgctccagaacagtgtgtaaacgacgagcaccgatgttttcggtagattcgttcacctgccatgccgcttccgcgatgcgtttaataccggagtcggtaaactcgatatttacgccttcagtcgccatcagtgctttgtactgcacggtgatagaggcattcggctcggtcagaatacgctcgaagtcgctggtggtcagcgcctgcagttcaacgcggattggcagacgaccttgcagttccgggatcaggtcagacggtttcgcaatctggaacgcgccagaagcgataaacagaatgtggtcagttttgaccatcccgtgtttggtggaaacggtgcaaccttctaccagcggcagcaggtcacgctgaacgccttcacgagaaacatccggaccggaagactcgccgcgcttacagattttgtcgatttcgtcgataaacacgatcccgtgctgctcaacagcgtcgatagcgtcttgcttcagctcttccgggttcaccagtttcgccgcttcttcttcaatcagcagcttcatggcgtctttgattttcagcttacgcgctttttgcttctggccgcccaggttctggaacatggactgcagctggctggtcatctcttccatgcccggaggagccataatttcaacgcccatcggtgctgcggcaagatcgatctcgatttctttgtcatcaagctggccttcacgcagttttttgcggaatgcctgacgagcagcggacggttcctgctgctgttcggtctgtccccagttgtttttagcaggtgggatcagcacgtcgagaatacgttcttctgccagttcttcagcgcgataacggtttttctcgatagcctggacgcgtaccattttcacggcggcatcggtcagatcgcgaataatagaatccacttccttaccgacgtagcccacttcggtgaatttggtcgcttcaactttgatgaacggcgcattcgccagcttagccagacgacgggcgatttcagttttaccgacaccggtcgggccgatcatcaggatatttttcggggtcacttcatggcgcagctcttcgttgagctgcatgcgacgccagcggttacgcagagcaatcgccacagaacgcttggcgttgtcctggccgatgatgtgcttatccagttcgctgacgatttcgcgtggggtcatttcagacatgggagatccttacgctttgtagcttaattcttcgatggtgtggaaatggttggtatagatgcaaatgtcgcctgcaatatccaacgccttttcagcaatttcacgggcgctaagttcagtgttttctaacagcgcgcgcgccgcagcctgggcgtaagggccgccggagccgatagcaataagatcgttttctggctgcaccacgtcaccgttaccggtgatgataaggcttgcagtttcatccgcgactgccagcagtgcttcaagtttgcgcagcatgcgatcggtacgccagtcttttgccagctcaacggcggctttgaccagatggccctgatgcatttccagtttacgttcaaacagttcgaacagcgtaaaagcatccgcagtaccgcccgcaaagcccgcgatgactttgtcgttgtacagacggcggacctttttcacgttgcctttcattacggtattgcccaacgtggcctgaccatcaccagcgatgaccacatggccgttacggcgtacgcttactatagttgtcacgagctgaccccttggttacgaatacagagtacaaaccccgtacaaaagtacggggcataatgcaattatagatgggggggattttgagggtttcaacccccggcggcgagccgaatgcagtttgtatgacccgccatcttcaaccgattgagggtgctgtctgcgttctctttgcctttcaccgggccaatgaccacacgattccagccattgttggtggtgattttgctgtcaaagccttcgaacgccagctgagcacgtaccgtctctgcctgttccgcgcctctgaagctaccgcactgcaccatccagcggcgttcgtcttttttctccgccgtcggttttggcgcgtcagcggcacgagcaactggcgcagcttgctgcggcttgctctgcgcagtcgtgtgcgcaggagtttgcagcagatcctggtacggctgctgagaagaagccggtttagactggcgcggttgcgcctgtaccggtgcggcttggctcgtacgcgtctgctgctgccagctttgttcagtcgtacggctctgctgagccaggcgttgctgttccgctaattgctgcgcctgacgttggcgctgtagcgtttgctgacgctgttccggcgtctgttcattccacggaacttcaaccagctgcgttggctgctggcgcatatcagcctgcatttgttcaagaagctgacgttgttctggtgtcagttgctccggcgttttcacttcaccaccggcagaaggttctgtgggcgcacgcactcccggctggcgactttccagctctttaatgtagcgccagcgttcttctggttttggtggtagtccgtttccggtcactttctggctttgcagcgtctcggactcttctttcttgtgatgcgtaatgaagtacagaccaccgataaaggtcacaagaacggcggcagcaatagcgaccatagcgggagaaaccgcaggcagatttcgttgctttttccgactggtgctcttttttcgccggctaggtgccggttggctgcggcgtacataatctcgttgtgccactatcgtttcgctgtatttattcgttcgtcagcccgccatgttacttaagcggcgggcctttgaccagtcacggcagtcttaaaggtttactttaaggtaacgcgcgtgtacttccccggatgataagttcgcagtccattaaacgagagccactgccaacgtgttgcccctgcatttgatcaagcaataacagcatagcttcccgaccgatttcgtaacgcggctgcgcgatggttgtcagcggcggatcacaaaattgcgtcaggtcgatgttatcaaaaccgattatggaaaggtcttccgggactttcagcccctggcgttttgcctgagaaagtgcgccgagcgccatcacatcgctatggcagaagacagcagtaggcggttgtggaagatcaagcagctgctgcatcgctttgcttccggcttcgaaggtgaagtcgccacgggcgatgtattgcggatcaaccataatgccgcagcgacgcagcgcctgaacatagccttgcaggcggtagtgacacagcggcatctcttcgggaccggctatacagccaatccgtttatgcccttgctcatataaataatttactgcatcaaatgcggcggtcagattgtcgatatgaactgtaggcagctccagctccggtgcaaattcgttcgccatcaccatcggcggcagattacgctgttcctcaatgctggcatcaaacggcagcctactacccagcaacaacatgccatcaatttgcttggtgatgatcaaatcgataaaggttttttcctgctgattttgatgcgcacagtcgccaatcagcaccagatatccgtgatttgccgccgtaacttcgataccgcgaataatttcgctaaagaagggatcgcagatatccgggacaatcaccagaatggtgcgggattcattacgcttgacgttgcgccccataggctgcggtaaataacccacttcccgggccgctttttcaacccgattacgggtggcctgggagactttatcgggattcattaatgctcgggagacggtcgctgtagagacttttgccttgagggcaacgtctttcatggtcgcggcagtttcctgcttcttcgctttcacactcactcctcgcctggcacgtcaggcgtactacatccatgtttacttcacatcggcaacatttttagcagatagcgcgtgaaaacggttacagaattttcatgaaaagtgtgatgaatattgaatttttcgatccgcctcgcatcgtgagcggtttaaccctcaatcggatcaacatccagcacccatttcaccttacgggaatccggtattgtattgatgagcgccagcgtaccgttaatgatgtgttgcaagcgcacgcgggaagggtgctgcaacaatatctgccagcgccagcgaccgccacgtttaggtgccagagccggaaccggaccgagaacccacagtttctcgtctgccagtgggctggagaggatcagattacgcagttgttgcaggaacaatggcgcgtgctgattgttatgatcttccgcacgcacaatcacatggctggtccacggcggtagctgcatcattcgccgctcagccagcgcctgttcggcaaaggcgtcgtagcctttatagagcaacgtttgcaacagaggatgttccggatggtgcgtttgcagcaccacttcgccctgtttacccgcacgcccggcacgaccggcgacctgggtgtaaagctgagcgaaacgctctgcgctgcgaaaatcggcagaaaacagcgcgccgtccacgtccagtaatgcaaccagcgtcacatccgggaaatggtgacctttcgccagcatttgtgtaccaatcaaaatccgcgcgccgccgcgatgtacttctgccagttgctgttccagcgcccctttgcggctggtggtatcgcggtcgatacgagaaatgggcacgccggggaacaacggcgcgagcgtctgttcaagctgttcggtgcccagccccacggggaccaggtgcgtggaaccgcaggaagggcactggcgcggcaccggacgctgactgtcacagtggtggcagcgcagatggtgctgcgcctgatgcagcgtgtagtagtgatcgcaacgtgggcattcggcaatccagccacagtcgtggcacagcagtgcaggcgcaaagccacggcggttaagaaagagaatgacctggttatcagcctgtaaatgctggcgcatacgagtgattaacgccggagccagacctgcctgcaccttctgaccttttaaatccagcacatgttgaattgccggacgcgcattccctgcccgacgggtcaggcgcagcaggcggtattttttctgctggacgttgcataacgtttccagcgcgggcgttgcggagccaagaataatcgggatttgctcgctgtgcgcacgatacaccgccaggtcgcgggcatgatagcgccagccttcctgctgcttgtaggagctgtcgtgctcttcatcaatgacaatcacgccgagatttttaaacggcgtaaacagcgcggagcgggtgccgatcacaatcgccgcctcaccatttttcgctttcagccacgcgctaagacgctcgctgtcgttcaggccggaatgcagaacttccacgggggcattaaaacgttcacgaaaacgggcgatagtttgcggtgtcaggccgatttccggcaccatcaccagcgcctgtttgccctgagcgagcacgttttccagtacgctgagataaacctccgttttaccggaaccggtaacgcccgccagcagccaggcagaaaaagtatctgccgcgctatgaattgcgccaacggcggtggcctgttcggtattcaatcgcaaccgctcaccagaaacggcatagttcgttcgccagtcgctaaactctggtgtttcacttgctaaatcacacagaccttttttgcgtagcgcctgcaacgcggcatcattaaattcgagcgtggcgacctggtcgcgccagattttgccttgccgtaacgccgccagcgcctgttgttgcttgggggagcgtttcaggctgttcagatccaccgcctggccttgttcagtggcaaaccagtaccacatcggcgcgttcgccgcaggccgcccctggcgtagtaaaatcggcaaggcatgaaacagcacatcgccaatcggatgatgatagtaatctgccgcccatagcagcaatcgccagacggagtgagtaaacaccggctcactatccagcacttcgactaccgcttttagctcattgagcggcagttcgctggcatcgctaacacttaccacaatcccgatgcgctcctgctgtttgccaaacggcacgcgcacgcgacacccagctttaaccgtcatgccttctggcagcagatagtcaaaggtacgaggaagcggaacgggcaaggcaacgtgggcaacgggcatagcatcatcctgacttgaaattcggtgggttagtatacacattgccgtagaagagtgcggatcagtttgcatacgctggttaatttctgtatgatttcgcgccttcgtacgaaatgatcgtattgaagctatacttttaacatcgcgtggtgtctggcgttagggctggaagagcgacgcggccttaaaccgaggttttcccatgaaaaaagatattcacccgaaatacgaagaaattactgctagctgctcttgcggtaacgtaatgaaaatccgctccaccgttggtcatgacctgaacctcgacgtgtgcagcaagtgccacccgttcttcactggcaaacagcgtgatgttgctaccggtggccgtgttgaccgcttcaacaagcgtttcaacatcccgggcagcaaataagaccggatttccgaaaaaagcgccgcacggcgctttttttgtgcctgaattttggtcgtattaccagctaaacagcggccattctttggcgaccgtggtgagttgtggcgcatcgaaaacggcttgtgggctgaccaccgtttcctcaagcggaatattcttgccgtaacgttctttgagctttgcctgaacttgtgggctgctcaggtcgaactctttcaacttctgctgctcgcccacgcgcattcccagcgcgttctggtaaaccttccacaccacttcgctacagtactggcgatcgtcgctccaactgaagctgaaatcatacggtttaccgagataacgttttgccgtttgcgccagtttttgctgttgttcaacactcagtccgccttcaacgcggcgaacaacgtatttgcccttttcaccatgggcgatccactgcttgagcggggtgtatttcaccgggccgactgcttcaaaaacgtagggctttttgttgcgtatcaccagcataccggtgtggctataatcggtatgggtcgccagttggatcgctttactttggctactgcgagagatctgaaagatgatgtcgccggtttgtggctgccaggcaaaggcaggtacagaaaccagcaggctgaggatcagcagcctgtttttcatagttaaacgtccatgtataaaaagcggtgggtcgcagacaacgtgctcgttgtttatgccggatgcggcgtgaacgccttatccggcctacaagttcgtgcaaattcaataaattgcaatatgacgtaggcctgataagcgtagcgcatcaggcgattccactccgcgccgctcttttttgctttagtattcccacgtctccgggttaatccccatctcacgcatgatctcttttgccgcttccgggatttcgtcgctgcgctctttacgcagatcggcatcatccggcaaaggttgcccggtaaaggcatgcagaaacgcttcgcacagcagctcgctgttggtagcgtgacgcaggttgttcacctgacgacgcgtgcgttcatcggtgaggatttttaacaccttaagaggaatggaaaccgtaatctttttgacttgttcactcttcttgccgtgctcagcgtatgggctgatatattcgccgctccattcagccatgagatacttaatcctcttcgtcaataaattgagaccagaccacacagttgatgtgggtactgaccgtaaacccgcatagtttaccgtacaggcgttaccgtgacatcgtgtaatgcacctgtcggcgtgataatgcatataattttaacggctatttgggatttgctcaatctatacgcaaagaagtttagatgtccagatgtattgacgtccattaacacaatgtttactctggtgcctgacatttcaccgacaaagcccagggaacttcatcacatgacgcgtaaacaggccaccatcgcagtgcgtagcgggttaaatgacgacgaacagtatggttgcgttgtcccaccgatccatctttccagcacctataactttaccggatttaatgaaccgcgcgcgcatgattacagccgtcgcggcaacccaacgcgcgatgtggttcagcgtgcgctggcagaactggaaggtggtgctggtgcagtacttactaataccggcatgtccgcgattcacctggtaacgaccgtctttttgaaacctggcgatctgctggttgcgccgcacgactgctacggcggtagctatcgcctgttcgacagtctggcgaaacgcggttgctatcgcgtgttgtttgttgatcaaggcgatgaacaggcattacgggcagcgctggcagaaaaacccaaactggtactggtagaaagcccaagtaatccattgttacgcgtcgtggatattgcgaaaatctgccatctggcaagggaagtcggggcggtgagcgtggtggataacaccttcttaagcccggcattacaaaatccgctggcattaggtgccgatctggtgttgcatagttgcacgaaatatctgaacggtcacagtgacgtagtggccggcgtggtgattgctaaagacccggacgttgtcactgaactggcctggtgggcaaacaatattggcgtgacgggcggcgcgtttgacagctatctgctgctacgtgggttgcgaacgctggtgccgcgtatggagctggcgcagcgcaacgcgcaggcgattgtgaaatacctgcaaacccagccgttggtgaaaaaactgtatcacccgagcttgccggaaaatcaggggcatgaaattgccgcgcgccagcaaaaaggctttggcgcaatgttgagttttgaactggatggcgatgagcagacgctgcgtcgtttcctgggcgggctgagcttgtttacgctggcggaaagtttagggggagtggaaagtttaatctctcacgccgcaaccatgacacatgcaggcatggcaccagaagcgcgtgctgccgccgggatctccgagacgctgctgcgtatctccaccggtattgaagatggcgaagatttaattgccgacctggaaaatggcttccgggctgcaaacaaggggtaaaaatgagtgtgattgcgcaggcaggggcgaaaggtcgtcagctgcataaatttggtggcagtagtctggctgatgtgaagtgttatttgcgtgtcgcgggcattatggcggagtactctcagcctgacgatatgatggtggtttccgccgccggtagcaccactaaccagttgattaactggttgaaactaagccagaccgatcgtctctctgcgcatcaggttcaacaaacgctgcgtcgctatcagtgcgatctgattagcggtctgctacccgctgaagaagccgatagcctcattagcgcttttgtcagcgaccttgagcgcctggcggcgctgctcgacagcggtattaacgacgcagtgtatgcggaagtggtgggccacggggaagtatggagcgcacgtctgatgtctgcggtacttaatcaacaagggctgccagcggcctggcttgatgcccgcgagtttttacgcgctgaacgcgccgcacaaccgcaggttgatgaagggctttcttacccgttgctgcaatagctgctggtgcaacatccgggcaaacgtctggtggtgaccggatttatcagccgcaacaacgccggtgaaacggtgctgctggggcgtaacggttccgactattccgcgacacaaatcggtgcgctggcgggtgtttctcgcgtaaccatctggagcgacgtcgccggggtatacagtgccgacccgcgtaaagtgaaagatgcctgcctgctgccgttgctgcgtctggatgaggccagcgaactggcgcgcctggcggctcccgttcttcacgcccgtactttacagccggtttctggcagcgaaatcgacctgcaactgcgctgtagctacacgccggatcaaggttccacacgcattgaacgcgtgctggcctccggtactggtgcgcgtattgtcaccagccacgatgatgtctgtttgattgagtttcaggtgcccgccagtcaggatttcaaactggcgcataaagagatcgaccaaatcctgaaacgcgcgcaggtacgcccgctggcggttggcgtacataacgatcgccagttgctgcaattttgctacaccagtgaagtggccgacagtgcgctgaaaaacctcgacgaagcgggattacctggcgaactgcgcctgcgtcaggggctggcgctggtggcgatggtcggtgcaggcgtcacccgtaacccgctgcattgccaccgcttctggcagcaactgaaaggccagccggtcgaatttacctggcagtccgatgacggcatcagcctggtggcagtactgcgcaccggcccgaccgaaagcctgattcaggggctgcatcagtccgtcttccgcgcagaaaaacgcatcggcctggtattgttcggtaagggcaatatcggttcccgttggctggaactgttcgcccgtgagcagagcacgcttagcgcacgtaccggctttgagtttgtgctggcaggtgtggtggacagccgccgcagcctgttgagctatgacgggctggacgccagccgcgcgttagccttcttcaacgatgaagcggttgagcaggatgaagagagcttgttcctgtggatgcgcgcccatccgtatgatgatttagtggtgctggacgttaccgccagccagcagcttgctgatcagtatcttgatttcgccagccacggtttccacgttatcagcgccaacaaactggcgggagccagcgacagcaataaatatcgccagatccacgacgccttcgaaaaaaccgggcgtcactggctgtacaatgccaccgtcggtgcgggcttgccgatcaaccacaccgtgcgcgatctgatcgacagcggcgatactattttgagcatcagcgggatcttctccggcacgctctcctggctgttcctgcaattcgacggtagcgtgccgtttaccgagctggtggatcaggcgtggcagcagggcttaaccgaacctgacccgcgtgacgatctctctggcaaagacgtgatgcgcaagctggtgattctggcgcgtgaagcaggttacaacatcgaaccggatcaggtacgtgtggaaagcctggtgcctgctcattgcgaaggcggcagcatcgaccatttctttgaaaatggcgatgaactgaacgagcagatggtgcaacggctggaagcggcccgcgaaatggggctggtgctgcgctacgtggcgcgtttcgatgccaacggtaaagcgcgtgtaggcgtggaagcggtgcgtgaagatcatccgttggcaagtctgctgccgtgcgataacgtctttgccatcgaaagccgctggtatcgcgataaccctctggtgatccgcggacctggcgctgggcgcgacgtcaccgccggggcgattcagagcgatatcaaccggctggcacagttgttgtaatttcagaaatttaataatgcccggtactcatgttttcgggtttatggtttctaatgaaatatattgaattatcataggattaggccggattaagcgtttacgacgaatccggcaagaagcaataagtacatggttagtttatatttgcagtccggtttgctttgcataccggattttctttttcttaccatcctgaagttttttcatcttccctgatttttcctcaccatcattggtcatttttcggttgacgcccttcggcttttccttcatctttacatctggacgtctaaacggatagatgtgcacaacacaacatataactacaagcgattgatgaggtaaggtatgagcttttttcacgccagccagcgggatgccctgaatcagagcctggcagaagtccaggggcagattaacgttagcttcgagtttttcccgccgcgtaccagtgaaatggagcagaccctgtggaactccatcgatcgccttagcagcctgaaaccgaagtttgtaagcgtgacctatggcgcgaactccggcgagcgcgaccgtacgcacagcattattaaaggcattaaagatcgcactggtctggaagcggcaccgcatcttacttgcattgatgcgacgcccgacgagctgcgcaccattgcacgcgactactggaataacggtattcgtcatatcgtggcgctgcgtggcgatctgccgccgggaagtggtaagccagaaatgtatgcttctgacctggtgacgctgttaaaagaagtggcagatttcgatatctccgtggcggcgtatccggaagttcacccggaagcaaaaagcgctcaggcggatttgcttaatctgaaacgcaaagtggatgccggagccaaccgcgcgattactcagttcttcttcgatgtcgaaagctacctgcgttttcgtgaccgctgtgtaagcgcgggcattgatgtggaaattattccgggaattttgccggtatctaactttaaacaggcgaagaaatttgccgatatgaccaacgtgcgtattccggcgtggatggcgcaaatgttcgacggtctggatgatgatgccgaaacccgcaaactggttggcgcgaatattgccatggatatggtgaagattttaagccgtgaaggagtgaaagatttccacttctatacgcttaaccgtgctgaaatgagttacgcgatttgccatacgctgggggttcgacctggtttataaatagtgtggcttttgtgaaaatcacacagtgatcacaaattttaaacagagcacaaaatgctgcctcgaaatgagggcgggaaaataaggttatcagccttgttttctccctcattacttgaaggatatgaagctaaaacccttttttataaagcatttgtccgaattcggacataatcaaaaaagcttaattaagatcaatttgatctacatctctttaaccaacaatatgtaagatctcaactatcgcatccgtggattaattcaattataacttctctctaacgctgtgtatcgtaacggtaacactgtagaggggagcacattgatgagcacgagtgacgatatccataacaccacagccactggcaaatgcccgttccatcagggcggtcacgaccagagtgcgggggcgggcacaaccactcgcgactggtggccaaatcaacttcgtgttgacctgttaaaccaacattctaatcgttctaacccactgggtgaggactttgactaccgcaaagaattcagcaaattagattactacggcctgaaaaaagatctgaaagccctgttgacagaatctcaaccgtggtggccagccgactggggcagttacgccggtctgtttattcgtatggcctggcacggcgcggggacttaccgtagtatcgatggacgcggtggcgcgggtcgtggtcagcaacgttttgcaccgctgaactcctggccggataacgtaagcctcgataaagcgcgtcgcctgttgtggccaatcaaacagaaatatggtcagaaaatctcctgggccgacctgtttatcctcgcgggtaacgtggcgctagaaaactccggcttccgtaccttcggttttggtgccggtcgtgaagacgtctgggaaccggatctggatgttaactggggtgatgaaaaagcctggctgactcaccgtcatccggaagcgctggcgaaagcaccgctgggtgcaaccgagatgggtctgatttacgttaacccggaaggcccggatcacagcggcgaaccgctttctgcggcagcagctatccgcgcgaccttcggcaacatgggcatgaacgacgaagaaaccgtggcgctgattgcgggtggtcatacgctgggtaaaacccacggtgccggtccgacaagtaatgtaggtcctgatccagaagctgcaccgattgaagaacaaggtttaggttgggcgagcacttacggcagcggcgttggcgcagatgccattacctctggtctggaagtagtctggacccagacgccgacccagtggagcaactatttcttcgagaacctgttcaagtatgagtgggtacagacccgcagcccggctggcgcaatccagttcgaagcggtagacgcaccggaaattatcccggatccgtttgatccgagcaagaaacgtaaaccgacaatgctggtgaccgacctgacgctgcgttttgatcctgagttcgagaagatctctcgtcgtttcctcaacgatccgcaggcgttcaacgaagcctttgcccgtgcctggttcaaactgacgcacagggatatggggccgaaatctcgctacatcgggccggaagtgccgaaagaagatctgatctggcaagatccgctgccgcagccgatctacaacccgaccgagcaggacattatcgatctgaaattcgcgattgcggattctggtctgtctgttagtgagctggtaagcgtggcctgggcatctgcttctaccttccgtggtggcgacaaacgcggtggtgccaacggtgcgcgtctggcattaatgccgcagcgcgactgggatgtgaacgccgcagccgttcgtgctctgcctgttctggagaaaatccagaaagagtctggtaaagccagcctggcggatatcatagtgctggctggtgtggttggtgttgagaaagccgcaagcgccgcaggtttgagcattcatgtaccgtttgcgccgggtcgcgttgatgcgcgtcaggatcagactgacattgagatgtttgagctgctggagccaattgctgacggtttccgtaactatcgcgctcgtctggacgtttccaccaccgagagtctgctgatcgacaaagcacagcaactgacgctgaccgcgccggaaatgactgcgctggtgggcggcatgcgtgtactgggtgccaacttcgatggcagcaaaaacggcgtcttcactgaccgcgttggcgtattgagcaatgacttcttcgtgaacttgctggatatgcgttacgagtggaaagcgaccgacgaaagcaaagagctgttcgaaggccgtgaccgtgaaaccggcgaagtgaaatttacggccagccgtgcggatctggtgtttggttctaactccgtcctgcgtgcggtggcggaagtttacgccagtagcgatgcccacgagaagtttgttaaagacttcgtggcggcatgggtgaaagtgatgaacctcgaccgtttcgacctgctgtaatctgaccccgttcagcggctgcttgctggcagtcgctgaacgttctttaccagcgtatagtgggcgaacgaaaactacacactggatctctcatgtctgccgcaggaaagagcaacccactggcaatcagtggcctggttgtgctcacacttatctggagttatagctggattttcatgaagcaagtcaccagttacatcggtgccttcgactttaccgccttacgctgcattttcggcgctctcgttttattcatcgtccttttattacgtggtcgcggaatgcgcccgacaccgtttaaatacaccttagccattgccctgttacaaacctgcgggatggttggtctggcgcagtgggcgttggtcagcggaggtgcggggaaggtggcgatcctgagctataccatgccgttctgggtggtgattttcgccgcgttgtttctcggtgaacgcctgcgacgtgggcaatatttcgcgattctgattgccgctttcggcttatttttggtgttgcagccgtggcaactcgatttctctagcatgaaaagtgccatgctggcaatcctctccggcgtcagttggggggcgagcgcgattgttgctaaacgtctgtatgcccgtcatccgcgcgtggatttattgagcttaacatcctggcagatgctgtatgcggcgctggtgatgagtgtggtcgctttactggtgccgcaacgtgaaattgactggcagcccaccgtgttctgggcgctggcctacagtgcgattctggcgacggcactggcgtggagcttatggttgtttgtattgaaaaacttgcctgccagtattgccagcttaagcacactggccgttcccgtttgcggcgtactcttttcctggtggctgctcggcgagaatccgggggccgttgaaggtagcggtattgtgctgattgtgctggcactggcgctggtgagccgtaagaaaaaagaagccgtcagtgtaaaaaggatctgaattttttcttcatgtggggcgatctcttatttaacaaaataacgataatgccccaccatccgccagttaaacagcacatcttcttcctgcgcgcctgcgccaatgttatgtatcaccagcggcgtaccgtcgcgggcgaagccatcactaaccaccccaatatgtgccagcccgttatccagtcgccaggagacaatatcgcccgcttgatagtcactggggttcttgctggtggggcgtgttttatcatggcggctaaaccaggtttccagattaggcacccgacggtgatcgatgttgctgtccgggcgctttaacttccatttttgcgggtactcagcaaaattcttcgccatatcttcgtgaaccagtttctgcaaatcgaccttctggctgcgcaatgcgcggatcaccacatcggaacatacaccgcgttcttgcggaacatcaccgccaggataagtaagctgcacatacgccggatcgtaaaatagcgtgctgccaatttgctgtctggcaccgtctgcgatggcaaggttggtattggcctggatttgtaccacggttggtggaacggcgggagattttaaggagtggctggtaaatgccgttagcaggctgagcagcgccagactagctttcatctggttcgtccgtgaaaataagagtcacagattcgaccttccgggctaacgattgttctgtagagaaaatgtccagaagcggataaaaaattcctgaacaacgtgggagtttcagattactggcacagagtgccggatgcggagtgaacgccttatccggcctacaaaagcacgcaaattcaatatattgcagagattgcgtaggcctgataagcgtagcgcatcaggcaattttgcgttcaaactcccggacaagccgggagtttggagtaggttattcccactcttgcaggaaacgctgaccgtactggtcggctaccagcagagcggcgtaaacctgatctggcgtcgcgccgccaggcatgttgtgaatggtttcaccttctgcacatgccgcttctgccacaattcgcattttcgccgggacatcttctttaatatccagttgagcgagagttattggcaaacctaccgcatggctaagggcagctacggtttcgatttcctccaccggcgcattttccagaaccagctgcgtcagcgtaccgaatgccactttttcaccgtgataatagtgatgcgcgtccgggatagcggtcaggccgttatgcactgcgtgcgccgcagccagaccaccactttcaaaaccaacaccgctcaaataggtgttcgcttcaatcacgcgctccagcgccggagtcactacatgctgttcggcagcaagcatcgctttttcgccttcttccagcagggtgttgtagcacagttcagccagtgccagcgcagcctgggtgcacttgccgcccgccatggtggtcgcgccgctacgagagcaggcacgcgcttcaaaccaggttgccagcgcatcgccgatacccgccgctaacagacgtgcaggtgcgccagcgacgattttggtgtcgacaatgaccatattcgggttatttggcaacagcagatagcggtcaaactcaccctcatcggtgtagataacagacaatgcgctgcacggtgcatcggtagaggcgatagtcggtgcgatcgctaccggaacacccatgaaatgtgccagtgctttggcagtatcgagggtttttccgccaccgataccgagaattgcgccacactgcgcagtctccgcgatgccacgcagacggtcgatctcattttggctacattcaccgccaaacggcgcaatttctactaccagtccagcatctttaaagcttttctcgacagtggattgagcaaaacctaaaacaaatttgtcacccaccactaaccagcgttctgccagcggcttcaggtattcgcccagacgattaatcacatcagcgccctggatgtatttacccggactttgaataatgcggtccataattgctcctttagagatgagtagtgccaaatgcggcattccagtcgtgttcgaacttctctatagcactctctaccgcaggggtgttgagcatttgttgcgctacatctaagggcagggtgatggattcacatcctgccagtaaacagtccagcgcctgacgcggcgttttaaagctggctgccagcaccatgctttctggcgcgtgcatttctaacagcgtttgcagctcctgaaccgtacgaatgccgtctccgccctgggcatctacgcggttaacatacggagcaacgtattttgcccctgccagtgcggctaataacccttgtgcggcgctatatacagcagtgccaagtgtagtaataccctcttttttcagtattttaattgctgccagaccttcggaagtcaccgggattttcaccacaatacccggaatagcgtcgcgcaggcgcttcgcttcttccaccatcccctgcgcgtcgcggctcatggtctgagcaaacagaatgccctcatcaccaatcgctttttgcagacgcggcagcacttcccatatggactccttgctggcagcgataatgctcgggttagttgtcaccccggcaatggggaatatgcgtgccagacgttcgacttctgcgacgttagcggtgtccagatacagttccatgatgtttccttttacagttccagttcatgttgcagcaggctggcgatagcgtcggcagaggcggcgttaaccagcgcgttacggaattcttcgtgcatgatgcggcgagcgaggcggctgaaaatgcgcatatgctgatcgcccgcagcgtgtttgttcagggttaacataatgatgaattgcgcttcatcatcgccccagcgcaccggcgcttgcagacgcgccacgctgatggtggattgctcaatgtgttcacttttgctgtgtggaatggcaaaactaaagcccagaccggtagagaaaacggcctcgcgcgcccacaagtcggcttccagtttacgcggatagcggcagcggcccgccagcagcaggttatcggtcatgcctttgagcacttcttctttgctgcgccagtcgctttccagtgtgatgcactcggcggtgaccagcggtgcgtcttgttgggtcatgcggaattgcgccagcaggtgttctacttccaggctagtacggcaggccattgcctggttgagcaacttgcggcactcacggctatcaagttgcgccatccgagctttcgccgccggaatacttggtgcgctcatgctgagttcatccagccctaagccgaccagcaacggcagcacggaacctttcgctcccagctcaccgcacagaccaatccatttgccctggcgatgcaccgcttgcacggcgtaatcgagcgcccgcaagaatgccggattcaggctgttgtagtgacgagtaaccttagcgttatcgcgatccaccgccagcagatactgcgtcaggtcattactaccaatactaaagaaatcaatctcttcgcagcattgatcgatgatgaacatcacgctcggcacttccagcatgatgccgagctggattttctcatcaaacggaatgtgttcgttacgtagttgctgtttggcttccgccagtttttctttcacccataagatctcttccatactggagatcatcgggatcatgattttcaggctgccgtgagcggaggcgcggaggatgctccgtagctgcgtggtaaacaagctcgcgtactcttcataaatacgcacggcgcgataaccgaggaacgggtttgcctctgcgggaatgttcagataatcaacgggtttgtcgccgccaatgtccatagtgcgcacaataatgctgcgtccgttggcggattccagcgcctgacaaaaaatgttgtacaactcgctttcgcccggtgcgctggtgcgatccatatagagcatttcagtgcggaacaaaccaacgccttccgcaccattgccgaatgcggcctgcgcttccacggagtgagcgatgttagcggcaatttcaatgcggataccgtcagcggtacgggcttgttgggtcagccagacacgctgttgctcacgcagggcgtcctgtacgcgggcttcttgctgataataacgagctacggcttcccctggctcaaccacaatcgccccggcgttgccgtcgatataaatcgtttgttgctgccacggagtaagggcatcaatatccacaccaaccagcgttggaatgttgaagctacgggcaaggatcaccgtatgactggtggtgccgccgcttttgagcaacaatcctttgaggtgatttttatccagttcgaggaactggctgggggtcagttcatcagccatacaaatggcgggctgcgtcagtttgcccggtgccgggaagcgttgctcaccgtagatttgctggagtaactggaagcagacgtcgcgtacgtccagggcacgttcttgcaggtagctgctgctggaacgggaaaactcttcgcaaaagtgattcgcgctggcaacaattgcttcggcgcagcttaatccggcgctgacgcctgccagtaaatgttcgcgcagggaagtatcgccagccagggatcggtgagcttccagaatcgcgctggtagcaccgtcgctatccagcagacgaaactcaatgtttttcagtaccagcgtcaggccgttttccagtgcggattgctcggcgtcaacgcctttggctgcgggaagattacccagcgcattgagatctaaagaagagatcggcgtcagaatgccgcctgcactaccgctgcacacggtgcgggcgcggataatttgcggattcagattggtcagactaaccggcagtggttccagttcgtcagatttaacttccgccagcggcgcatcgcagtgggggaattcatcgcgcagccattggcttaaacgctggtgcgcttcctgttcgtcggccccggaaatcagtaactggcagttatcgcccgccagcgtatcggtgccaatcagcgcaagggcgcttttggcgttgcccttgcggtcagtgcgcaggttatgccactcaatttgactactaaaagtattacacagcgtttcaacgtggcttgccggacgcgcatgtacgccgttaggtagctcacaaataaattccacaatcagggccattgcctctctcccggtacggttttctgtttacaggataagagcgcacggcaacggcctgccatgtgacaaatctgccaaaagctggacaaatgtaatgtaaccgtcaatttgcgacgcgtctcacaagacgctgttttgcggcatgcttccggtttatcgcaagttatgaggcggatcgcatttttgtactgatattacaaaagtccagtaaatggcctttttatccactgtttgctccgcctgcgattgcctattgtttcctccatcaaaaatatggacatgggctttcgcaagcccgggagcagcttatgaatgagttggtgcagatcctgaaaaatacccgtcagcatttaatgacgggcgttagtcacatgattcccttcgtggtaagcggcggtattttgctggcggtttccgtcatgttgtatggcaaaggcgcagtgccggatgccgtagccgatccaaatctgaaaaaactgtttgatatcggcgttgcgggcttgacgctgatggtgcctttcctcgcagcgtacatcggttattccattgcagagcgttctgcgctggctccgtgcgctatcggtgcctgggttggtaacagctttggtgcgggcttctttggtgcactgatcgccgggattatcggcggcatcgtggtgcattacctgaagaaaattccggtgcataaagttctgcgcagcgtgatgcctatcttcattattcctatcgtcggcacactgattaccgcaggcatcatgatgtggggcttgggcgagcctgtaggggcgttgaccaacagcctgactcagtggcttcaggggatgcagcagggcagcattgttatgctggcggtgatcatgggtctgatgctggcgttcgatatgggcggtccggttaacaaagtggcctatgccttcatgctgatttgcgttgctcagggtgtttataccgtggtggccatcgctgccgtgggtatttgtatcccgccgctggggatggggctggcgacgctgattggtcgtaaaaatttctccgcagaagagcgcgaaaccggcaaagcggcactggtgatgggctgtgttggcgttactgaaggggcgattcctttcgccgctgccgatccgctgcgtgtcattccttccatcatggtcggtagtgtttgtggtgcagtaactgcggcgctggtcggtgcgcagtgctatgcaggctggggtggtctgattgtgctgccggtggttgaaggcaagctgggttatatcgcagcagtggctgtcggagcagtggtgacggctgtttgtgtgaacgtgctgaaaagtctggcgcgtaaaaatgggtctagcactgatgaaaaagaagacgacctggatttggattttgaaattaattaattgaggaacgagccatgacgaaaattattgcagtaaccgcatgtcctagtggtgttgcccatacctatatggcagcagaggcgctggaaagtgccgcgaaagcgaaaggctgggaagtgaaagtagaaacccaggggagtattggtctggaaaatgaactgactgcggaagatgtggcgagcgctgatatggtgattctgaccaaagatatcggcatcaagtttgaagagcgttttgctggcaagaccatcgtgcgcgtcaacatcagcgatgcagtaaaacgtgctgacgccattatgagcaaaattgaagctcacctggcgcaaaccgcttaagttcttctcccgctcgcaagggcgggttcgctttcccacaggagttcctcatgacgaatcgtatctctcgcctcaaaactgcactgtttgccaatacccgtgaaatcagcctggagcgggcgctgctttataccgccagccatcggcaaaccgaaggcgaaccggtgatattgcgccgggcgaaagcaacagcgtatatccttgaacatgttgaaattagcattcgtgatgaagaactgattgccggtaaccgcaccgtaaaaccgcgcgccgggattatgagcccggaaatggacccttactggctgctgaaagagctggatcaattcccgacgcgtccgcaggaccgctttgctatcagcgaagaagataaacgtatctaccgtgaagagttgttcccgtactgggaaaaacgtagcatgaaagatttcatcaacgggcagatgacagatgaagtaaaagccgcgaccaacacgcagattttcagcatcaaccagacggataaaggccaggggcacattattattgattacccacgcctgttgaatcacgggctgggtgagctggtggcacagatgcagcaacattgtcagcaacagccggagaatcacttttatcaggccgcgttgttactgctggaagccagccagaaacacattttgcgttacgccgaactggcggaaacgatggcggcaaactgcacagatgcccagcgtcgcgaagagctgctgactattgcagagatctcccgccataacgcgcaacataagccgcagacgttctggcaggcgtgccagttattctggtacatgaacatcattctgcaatacgaatccaacgccagtagcctaagcttggggcgcttcgaccagtatatgttgccgttctatcagacaagtttaacccagggcgaagatgcggcgttcctgaaagaactgctcgaatctttatgggtgaaatgcaacgacatcgtgctgttgcgctccaccagtagcgcgcgttatttcgccggtttcccgaccggctataccgcactgctcggcgggttaaccgagaacggacgtagcgcggtgaacgtgcttagcttcctttgccttgacgcctatcaaagcgtgcaattaccgcaaccgaacctcggcgtgcgcactaacgccttgatcgacacgccgttcctgatgaaaaccgccgaaaccattcgcttcggtaccggtattccgcaaatctttaacgatgaagtggtggtgccagcgttcctcaaccgtggcgttagcctggaagatgcgcgcgactattccgtagtgggctgtgtggaattatctattcccggcagaacctacggcttgcatgacatcgcgatgtttaatctgctgaaagtgatggaaatctgcctgcatgaaaatgaaggcaatgctgcgctgacttatgaaggtttactggagcagatccgcgccaagatcagccactacatcaccctgatggttgagggcagcaatatttgtgatatcggccatcgcgactgggcacctgtaccgctgctcagtagctttatcagcgattgtctggaaaaaggccgcgatattaccgatggcggcgcgcgttataacttctccggcgtacaggggatcggtatcgccaacctgagcgattctctccatgcgttgaaagggatggtttttgagcaacagcgtttaagttttgacgaattgctgagcgtattaaaagccaacttcgcaacgccagaaggcgaaaaagtccgcgctcgcttaattaaccgcttcgagaaatacggtaacgatatcgacgaggtggataacatcagcgccgaactgttgcgccactactgcaaagaagtggaaaaataccagaacccgcgcggcggctacttcacgccgggaagctataccgtttctgctcacgtcccgttgggaagcgtggttggcgcgacgccagacggtcgttttgccggagaacagctggcagacggcggcttgagtcccatgctgggccaggacgcacaagggccaacagcggtactgaagagtgtcagtaagctcgataacacgctgctgtctaacggtacgttgctgaacgtgaaattcactccggcgaccctggaaggtgaagcaggattacgcaaactggccgacttcttacgggcgtttacccagcttaagttacaacatattcagtttaacgtggtgaacgccgacacgttgcgggaagcgcaacagcgcccacaagattatgccgggctggtggtgcgcgttgccggatacagcgccttctttgtcgaactgagcaaggagatccaggatgacatcatccgccggacagcgcatcagctgtaattaaactgtcgaaggagatccaggatgacaagttccgccggacagcgcatcagctgtaacgttgtggaaacgcgccgcgatgatgtggcgcgcattttcaacattcagcgttatagtctgaatgacggcgagggcattcgtacggtggtcttttttaaaggctgtccgcatctttgcccgtggtgtgctaatccggagagcatctccggcaaaatccagacggtacgcagagaggcgaaatgtctgcactgtgcgaaatgtttgcgtgatgcggatgaatgcccctccggggcgtttgaacggattggtcgcgatatcagccttgacgctctggaacgggaagtgatgaaagatgacattttctttcgcacgtccggcggcggcgtcacgctttctggcggcgaagtgttaatgcaggcggagtttgctacccgttttttacagcgactgcggctgtggggtgtgagttgcgccattgaaactgccggagacgcaccagccagcaagctattaccgctggcgaaattgtgcgatgaagtgttgttcgatttaaaaattatggacgcgactcaggcgcgggatgtggtgaagatgaacctgccacgcgtgctggagaatctgcgtttgctggtgagtgagggcgtcaacgtgatcccgcgtttaccgctgatccctggtttcacgctcagccgggagaatatgcagcaggcgctggatgtactgatcccgctgaatatcaggcagatccatctgttaccgtttcatcagtacggcgaaccgaaataccgcctgctggggaaaacatggagcatgaaagaggtgcctgcgccgagcagtgctgatgtggcaacgatgcgcgaaatggcagaacgggccggacttcaggttaccgtgggaggttaaaatggcatacctggtggcagtaaccgcctgcgtaagcggcgtggcgcatacttatatggcggcggaacggctggaaaagttgtgcctgttagagaagtggggagtcagcattgaaactcagggcgcgctgggaacggagaatcgtttagcggatgaggatatccgccgggcggatgttgctctgttgattacggatatcgagcttgccggtgccgagcgatttgaacattgccgctatgtgcaatgcagcatctacgcattcctgcgtgagccgcagcgggtaatgagcgcggtgcgcaaagtgctttctgcgccgcagcaaacccatcttattctggagtaattattctggagtagtcggtttttctgtcagttggctgtggtactgccggcgatattcgctcgggctgcgttcggtgtttttacgaaacagacggcagaagtagttgctgtcgacaaagccgcaggcgtgcgccacttcttttaccttcaggtcatagcctttcaataacgtcttagcgtgctccagtcgcgtgtgattcaggtattcgttaaaaccaatggcccccgttttttgaaacaggtggctgaggtaatttgggctaatataaaacgcctgtgcaacagattcgcgggtaagcgcggaggcatagcgttcgtcgatataatcgcgaatagcttcaaatagtgcctggctgcgactggcggtctggatttggctgccaagcaaatcgcggcagtggctaagcaggctggcgacgataagccttgccgtttgctgctcctgcggctgcatttgcatttcattgagcgtttgtagcagaaaagaacctatgcgtgggccgcgtcgggcgacgtgttgcttcgccagattttgatattgtttgccatcccattgcacgacgctgaagccgagttgctgtttgccaaacagcacgctaaaggtagtagcgggggcttgccattgtggaaaattccagccaccagcaggaacgtacagcacatcgccgggaactaacgttgctccagcgccggtatcaacaaactcaccttccagcacaatttccagccgtggaaaatcgacctgatacgcaagatcgggcaccgggccgttactgctggcaaagtaaatctggcgcagggacagcgggccgttgatcaggcgggagagcagatagctgacgtcgtgatacatgttattcccttaggtatgtagacgggaaaacagtaactggcattattaaaaaaggccacctgaaaagtgtggcctgaggggagttcgatgtaaacattgcggcagttgtattgccggatgtggcgtaaacgccttatccagcctaccgccgcgatctgtaggccggataagacgcgtcaagcgtcgcatccggcaaatagcgcctggctgataattactgattacccacctgatcgccatagggcagtgtgtcgtaatcgatcagtgcgtttttcttatacgggttaccaatccagcgggtagtttctttgaactgcggattcaccacactacgggttggatcgtaaccgtcgtaagataagcccgccaaatcactccaggtgtggatcagttccgccaggctgtatttacgatcaacatcctggctgaaatcacggggatgagtcgcttgccatttttcactcgtccacagcaggaacggaatggtgtacatatgacgcgtcgggttgtcctcattacgcccctgagttttgtgcggcggcgtgtcgtaaacctcttcaccgtggtcagagaaataaaccaggaaaccgttcgggtttgctgctttaaagtctttaatcaggctggcaaccacatgatcgttatacaggttagcgttgtcataatcgttataactctccagctcttccgcgtttaatcccggcggaacatgatcggtattgccatcaaacttgccctgattttccgggtagcggtatttgtatttgatatgcgtacccagcagatgaacaatgatcagtttcttcggcgcagggtcattcagcacttcctggaacggcttcagcacgttggtgtcgtattcacgcgcactctgcgtacgttgctggttcatgtagtactgcttgtcggtctggcggctaaataccgtcagcatggtattgcgggcggtcatcgtctgctggttggtgatccagaaggttttataacccgcctgtttcatcatgttcatcaggctcggctgcgtcagatacagatccgggttcttttcattggcaaaggtcagcgcctgttgcaggatttcaatggtgtacggacgagacgtaactacgttattaaacacggtcagattcggatcggttttatgcagcgcatccagctccggcgtggtttcacgcggataaccgtacagactcatgcgtccgcgctgggtgctctcgccaatcaccagcactaaagtgcgcggttcgttaccgctttcatctttgaaattagccagtggcggcaaggcattattttcattcagtaactttgttaggctgtttagttgctgacgatactgataatagccggtcaggaattgccacggtgcggcaggctccatacggctggccaggttatccaacgttttctcaaacggcttgtttttgataaacgtattcatggcgatcggatgcagaatcaagccataaagcagggcaaaagagacaacataacgccacggctttggaatatagaccgggcgcaggcgtgtccacagcagaactgccaccgccgtataggccagcgcgataagcacaattttcaggctgaaatactggcttaaatactcgctggcttcgttggtgttggtttcgaacatcacaaacagaacgctctggctgaactcctgaccgtagatgacgtagtagcacagcgccgccagagaggccgcccatagcaccacgccgattactgcggcaataattttaatccgcttcggaaagaggaataccgggatcaaccacaggctactgaataacaggctgtcgcgaatgccgttagtgccactataaccactgatgtaaataatggcctgtagcagagtagagaaaaaccaaaagtagagcagtgcccaacccagggctttccagctaaaaagaggtttagcctggacttctgtggaatgcatagtaagaacctgtcttgaaaaaatatcgccgaatgtaacgacaattccttaaggatatctgaaggtatattcagaatttgaataaaatgcagacagaaatatattgaaaacgagggtgttagaacagaagtatttcagaaaaccctcgcgcaaaagcacgagggtttgcagaagaggaagattagccggtattacgcatacctgccgcaatcccggcaatagtgaccattaacgcttgttcgacgcgaggatccggttcctggccttctttttctgcctggcgggagcggtgcagcaactcggcctgcaatacgttcagcgggtcggtgtaaatattccgtagctgaatagactctgcaatccacggcagatcggccatcagatgggaatcgttggcaatcgccagcaccactttgatgtcttcttcttgcaggttgcgtaactctttacctaacggccacagtgctttgtctaccaggcgttggtcatagtattccgccagccacaggtctgctttggcgaagaccatctccagcatgccgagacgcgtgctgaagaatggccaatcgcggcacatagcctccagctcgctctgtttgccgtcttcgaccactttttgcagcgccgtacctgcacccagccaggcggggagcatcagacggttttgcgtccaggcgaagatccacggaatggcgcgtagactctcgacgccgccggttgggcgacgtttcgccggacgactacccaacggcagtttgcccagttcttgttccggcgtagcggagcggaagtaaggcacaaaatctttgttttcacgtacgtagccgcggtagacatcgcaggagatgacactcagttcatccataatgcgacgccagctctctttcggctccggcggtggcagcaggttggcttccagaatcgccccggtataaaggctcaggctgctgacggtgatttctggcagaccatatttaaagcggatcatctcgccctgttcggttacgcgcaggccgcctttcaggcttcctggcggttgactcagcagcgccgcatgagcaggtgcgccgccgcgaccaatggaaccgccgcgaccgtggaacaacgtcagctcaatacccgctttttcgcaggttttgattaatgcatcctgtgcctgatattgcgcccaggaagctgccatcactcccgcatcttttgcactgtcggaatagccaatcatcaccatctgtttgccctgaatcaggccacgataccagtcaatattgagcagctgggtcatgacatcgttggcgttgttcagatcatcgagggtttcaaacagcggagcaaccggcatcgcaaacccgatacccgcttctttcagcagcaggtggacagccagtacgtcggacggcgttttcgccatgctgatcacgtaggcggcaatggagccttgcggtgcttcggcaatcacctggcaggtatcgagcacttcgcgcgtttcggcgcttggttgccagttgcgcggcagaagcggacgtttggagttcagttcgcggatcaggaacgcctgtttgtcggcctcactccagctttcgtagtcgccgataccgaggtagcgggtcagctcgcccagcgcttcggtatgacgcgtgctctcctgacggatatcaatacggaccagcggtacgccgaaacatttcacgcggcgcagggtgtcgagcagatcgccgttggcgataatacccatgccacacgcctgaagactctggtagcaagcgtagagcggttcccacagttcttcgttttgtgtcagcaggccttctggttttggcagttcttcgcctttcaggcgcgcttccagccatgcctgtgtcgccatcaggcgagaacgcaggtttttcatcagatagcgatacggttctgcggcaccttcttcgccaaccagcgccagcagttcaggggtcgcttcaaccatgctcagttcagaaaccagcacctgaatatctttcaggaacaaatcggtggctttccagcggctgagtagcaggacgtggcgggtgatatcggcagtgacgttcgggttgccgtcgcggtcgccgcccatccagctagtaaaacggaccggaacaaattcgacgggcagtttgtagccgaggttctcttccagttgttcgttcagttcgcgcaggtaatttggtacgccttgccacaggctgttttccactacggcaaagccccatttggcttcatctaccgggcttggacgcagcttacggatttcatcggtatgccaactctgggcgatcaactggcgcaggcgacgcatcagctggttgtgttcgtagtcagcgatatctttgttatcgagctgttttaaacaggcgttcacttccaccattttgtggatcagtgtacgacgggtaatttcggttgggtgagccgtgaggaccagttccaggctcaggctttccactgcttttttgatggtgtcttcgctcagttccggctggtttttcagtttacgcagggtgcgggcgatcacttccgggttgctggcagcttcgcctttcgggctaatgctgtggtattgctcggcggtgttggccaggttcaggaactgactaaacgcacgcgcaacgggcagcagctcgtcgttgctcaaattttgtaaggtggtgagcaactcctggcggttagcatcattgccagcgcgactagatttgctcaacttacggatagtttctacgcgttcaagaatgtgttctcccaacgcatccttgatggtttctcccagcactttgccgagcatactgacattactacgcaatgcggaatattgttcgttcatattaccccagacaccccatcttatcgtttgatagccctgtatccttcacgtcgcattggcgcgaatatgctcgggctttgcttttcgtcgtcttttataaagccacgtaaaagcggtgacgtcaaatgctgcgaaatcgcttcagcaaacgaataaatagcaggaatttacgtcattaaattcacgacgctttaaataagcgtaacttatggaaatgttaaaaaatcgccccaagtaacaccaaaggtgtaggtcggataagatgcgcaagtatcgcatccgacattattgcggcactggagtttggcaacagtgccggatgcggcgcgagcgccttatccggcctacagttgggcatcgtttgagtcactgtcggtcggataagatgcgcaagtatcgcatccgacattattgcggcactggagtttggcaacagtgccggatgcggcgcgagcgccttatccggcctacggttgggcatcgtttgagtcactgtaggtcggataagatgcgcaagcatcgcatccgacattattgcggcactggagtttggcaacagcgccggatgcggcgcgagcgccttatccggcctacgttttaatgccagcaaaaatggtgaattacctgggttatcagttcgcgggtgggcttgataaaccgtgtttccagatattcatcaggttgatgagcctgattaatactgccaggccccaacaccagcgtcgggcataacgtttgaataaacggcgcttcggtacagtagttcaccacttcggtttttgctccgagcaatttctcaaccacttcaaccagttgatgattcggtgggcattcatagccagggatcggcggatgcagctcgtcgaccgtcagacgacccggccagcgttcgctcaccggagccaatgcatcgttgagcaaaccattaagttcattgagtgtcatgccaggcagcggacgaatatccatatgcaactcacagcaagcgcaaatacggttagaagcgtcgccaccgtgaatatgcccgaggttgagcgtagggtatggcacggtaaacgcttcgtagtgataacgttctttcaggttatcgcgcaattgcaaaatatgcccgatggcgtcgtgcattagttcgatagcgttaactccgcgtgctggatcgctggagtgcccgctctggccctgaatacggatggcgttagagatatgacctttatgtgcgcgtaccggttgtagactcgtcggttcgccaatgatggcgcaatccgggcgcagggcggtagtttcggcaaaataacgcgctccggccatactggtttcttcatcagcagtcgccagaatgtagagcggttttttcagtttcgtgacgtcgacatcgcgtagcgcatcaaggataaacgcaaaaaagcctttcatgtcggcggtgcctaagccgtaaagcttgccgtcatgctccgtcagtgtaaacggatcgcgcgtccagcgaccgtcatcaaatggcaccgtatcggtatgccccgccagcaacaagccgccagccccctgtccgatacttgccagcatattgaatttgttgcgagttcctggaacaggctgcacttccacattgaagcccaaatctttaaaccagtccgccagcagagtgattaaatctgcattgctttgatcgagtgcctcttccgtggcgcttatactaggtgtggcaatcagagcgcggtaaatctcgataaatggcggtaatttgtttttcattgttgacacacctctggtcatgatagtatcaatattcatgcagtatttatgaataaaaatacactaacgttgagcgtaataaaacccaccagccgtaaggtgaatgttttacgtttaacctggcaaccagacataagaaggtgaatagccccgatgttgaatacgctgattgtgggtgccagcggctacgctggcgcagagctagtgacctatgtaaatcgccatccgcatatgaacataaccgctttgactgttagtgcgcaaagcaatgatgcgggaaagttaatctccgatttgcatccgcagctaaaaggcatcgttgatctgccgttgcagccgatgagcgatatcagcgagtttagcccaggggtggacgtagtgtttctcgccaccgcccatgaagttagccacgatttagcgccgcagtttcttgaagcgggctgcgtggtgttcgacctttccggcgcgtttcgtgttaacgacgccaccttctatgaaaaatattacggctttacccatcaatacccggaactgttggaacaggcagcctacggtctggcggagtggtgcggtaataaattaaaagaagcgaatttgattgcggtgccgggctgttatccgacggcggcacagctggcgctgaaaccgttgattgatgccgatcttcttgacctcaatcagtggccggtgatcaacgccaccagcggcgtgagcggtgcagggcgtaaagcggccattagtaacagcttttgtgaagttagcctgcaaccgtatggcgtctttactcatcgccatcaaccagagatcgccacacacctcggtgctgacgttatcttcaccccacatctgggcaatttcccgcgcggcattctcgaaaccattacctgccgcctgaaaagcggtgtgacccaggcgcaagtcgcgcaagtgttacagcaggcgtatgcccataaaccgctggtgcggctgtatgacaaaggcgttccggcgctgaaaaatgtcgttgggctgccattttgcgatatcgggtttgccgttcagggcgagcatctgattattgtggcgaccgaagacaacttactgaaaggcgcggcggcacaagcggtacagtgcgccaatattcgtttcggctatgcggaaacgcagtctcttatttaagggtgcaatgatgaatccattaattatcaaactgggcggcgtactgctggatagtgaagaggcgctggaacgtctgtttagcgcactggtgaattatcgtgagagtcatcagcgtccgctggtgattgtgcacggcggcggttgcgtggtggatgagctgatgaaagggctgaatctgccggtgaaaaagaaaaacggcctgcgggtgacgcctgctgatcagatagacattatcaccggagcactggcgggaacggcaaataaaaccctgttggcatgggcgaagaaacatcagattgcggccgtaggtttgtttctcggtgacggcgacagcgtcaaagtgacccagcttgatgaagagttaggtcatgttggactggcgcagccaggtagccctaagcttatcaactccttgctggagaacggttatctgccggtggtcagctccattggcgtaacagacgaagggcaactgatgaacgtcaatgccgaccaggcggcaacggcgctggcggcaacgctgggcgcggatctgattttgctctccgacgtcagcggcattctcgacggcaaagggcaacgcattgccgaaatgaccgccgcgaaagcagaacaactgattgagcagggcattattactgacggcatgatagtgaaagtgaacgcggcgctggatgcggcccgcacgctgggccgtccggtagatatcgcctcctggcgtcatgcggagcagcttccggcactgtttaacggtatgccgatgggtacgcggattttagcttaagttttgttggccggaggcgcagctttccggcattgaatttcaaaataaggaaacagagttatggcactttggggcgggcgttttacccaggcagcagatcaacggttcaaacaattcaacgacagtctgcgctttgattaccgtctggcggagcaggatattgttggctctgtggcctggtccaaagccctggtcacggtaggcgtgttaaccgcagaagagcaggcgcaactggaagaggcgctgaacgtgttgctggaagatgttcgcgccaggccacaacaaatccttgaaagcgacgccgaagatatccatagctgggtggaaggcaaactgatcgacaaagtgggccagttaggcaaaaagctgcataccgggcgtagccgtaatgatcaggtagcgactgacctgaaactgtggtgcaaagataccgttagcgagttactgacggctaaccggcagctgcaaagcgcgctggtggaaaccgcacaaaacaatcaggacgcggtaatgccaggttacactcacctgcaacgcgcccagccggtgacgttcgcgcactggtgcctggcctatgttgagatgctggcgcgtgatgaaagccgtttgcaggatgcgcttaagcgtctggatgtcagcccgctaggctgtggcgcgctggcgggaacggcctatgaaatcgaccgtgaacagttagcaggctggctgggctttgctagcgcgacccgtaacagtctcgacagcgtttctgaccgtgaccatgtgttggaactgctttctgctgccgctatcggcatggtgcatctgagccgttttgctgaagatctgattttctttaacaccggcgaagcggggtttgtggagctttctgaccgcgtgacttccggtagtagtttaatgccgcagaagaaaaacccggatgcgctggagctgattcgcggtaaatgcggccgggtgcagggggcgttaaccggcatgatgatgacgctgaaaggtttgccgctggcttacaacaaagatatgcaggaagacaaagaaggtctgttcgacgcgctcgatacctggctggactgcctgcatatggcggcgctggtgctggacggcattcaggtgaaacgtccacgttgccaggaagcggctcagcagggttacgccaacgccaccgaactggcggattatctggtggcgaaaggcgtaccgttccgcgaggcgcaccatattgttggtgaagcggtggtggaagccattcgtcagggcaaaccgctggaagatctgccgctcagtgagttgcagaaattcagtcaggtgattgacgaagatgtctatccgattctgagcctgcaaagctgcctcgacaagcgtgcggcaaaaggcggcgtcagtccgcagcaggtggcgcaggcgattgcttttgcgcaggctcggttagggtaagaacatttatatgtataaatttgagcctggcttatcgccgggcttttttatggcaaaaaaaagcggatcctggagatccgcaaaagttcacgttggctttagttattcgagttgagaaactctcgaaacgggcagtgacttcaagggttaaaagaggtgccgctccgtttctgtgagcaattatcagtcagaatgcttgatagggataatcgttcattgctattctacctatcgccatgaactatcgtggcgatggaggatggataatgaatattcgtgatcttgagtacctggtggcattggctgaacaccgccattttcggcgtgcggcagattcctgccacgttagccagccgacgcttagcgggcaaattcgtaagctggaagatgagctgggcgtgatgttgctggagcggaccagccgtaaagtgttgttcacccaggcgggaatgctgctggtggatcaggcgcgtaccgtgctgcgtgaggtgaaagtccttaaagagatggcaagccagcagggcgagacgatgtccggaccgctgcacattggtttgattcccacagttggaccgtacctgctaccgcatattatccctatgctgcaccagacctttccaaagctggaaatgtatctgcatgaagcacagacccaccagttactggcgcaactggacagcggcaaactcgattgcgtgatcctcgcgctggtgaaagagagcgaagcattcattgaagtgccgttgtttgatgagccaatgttgctggctatctatgaagatcacccgtgggcgaaccgcgaatgcgtaccgatggccgatctggcaggggaaaaactgctgatgctggaagatggtcactgtttgcgcgatcaggcaatgggtttctgttttgaagccggggcggatgaagatacacacttccgcgcgaccagcctggaaactctgcgcaacatggtggcggcaggtagcgggatcactttactgccagcgctggctgtgccgccggagcgcaaacgcgatggggttgtttatctgccgtgcattaagccggaaccacgccgcactattggcctggtttatcgtcctggcagtccgctgcgcagccgctatgagcagctggcagaggccatccgcgcaagaatggatggccatttcgataaagttttaaaacaggcggtttaaaccgtttaacgcagctacccgataggcttccgccatcgtcgggtagttaaaggtggtgttgacgaagtactcaatagtgttgccgccacctttctgttccataatcgcctgaccgatatgaataatttcggcagcgcgctcgccaaagcagtgaatacccagaatctcttttgtttcccgatggaacaaaattttcagcgtgcccacgttcatgccgacgatttgtgcgcgtgccagatgtttaaactgggcgcggcccacttcatatggcactttcattgcggtcagctgctgttcggttttgcccacagagctgatttccgggatggtgtaaataccggtagggatatcttcaatcagatgtgcggtggcttcgccttttaccagcgcctgcgcggcaatgcgcccctggtcataggccgcgctcgccaggctcggataaccaatcacgtcgcccaccgcgtaaacgtgtggctgtgcggtctgatacatgctgttgaccttcagctgtccgcggctgtcagtttctagcccaatgttctgtaacgccaggctatcggtattaccggtgcgaccgttggcatagagcaggcagtcagctttcagttttttaccgctcttcagatgcatgatcacaccatcgtcacagccttcgatcttctcgtactcttcgttgtgacgaatcactacgccactgttccagaagtgataggagagagaatcactcatctcttgatcgagaaatgccagcaggcgatcgcgggtgttgatcagatccacttttacatccataccgcggaagatgctcgcatattcacagccgatcactccagcaccatagataagtacatggcgcggttcgtggtgcatgctgagaatactgtcgctgtcgtaaatgcgtggatgggtgaaatcaacatctgttggatgatatggacgagagccgcaggcaataacaaatttttcagcggttagtgtttcaacgctgccgtccgggcaatccagcgccaacgtatgctcgtcaacaaagcgagcgtttccctgcaatatttcacagtgattacgttcgtaaaatccctgacgcatgcgcgtttgttgattaatcacgttatcggcatggttaaggatatcggcaaaagaagagcggagcagtcgggaatggtcgctgtaaagtgggttttgattgaattctataatgcggctgacggcgtgacggagagctttgctcgggatggtgccccagtgggtgcaaccgccgccaacattttgataacgctcgataactgcgacgcgcgcaccttgcttaaccaggcccattgcagcgccttcgccgccggggccggaacctattactatggcatcgtaatcgtaggaatgtggcatggtagggcttacctgttcttatacataaaagcaacagaatggtaacattttatcgcgggtaagccaattgatccccgtcatttatctggctatatcctgagcggcctttgctttgtctgtttcttacttttgccctgacgttttattggatttttatcgacgatactctccgtttaagcggcaggtttccgctgtacgtaaaagaaccggccaaagaattgcagtaaatatgttttattgcgttaccgttcattcacaatactggagcaatccagtatgttcattctctggtatagtgccagcagtacttttggcaaggatagtgacatcgtgatgggcgtaagagcgcaacaaaaagaaaaaacccgccgtagcctggtggaagccgcatttagccaattaagtgctgaacgcagcttcgccagcctgagtttgcgtgaagtggcgcgtgaagcgggcattgctcccacctctttttatcggcatttccgcgacgtagacgaactgggtctgaccatggttgatgagagcggtttaatgctacgccaactcatgcgccaggcgcgtcagcgtatcgccaaaggcgggagtgtgatccgcaccagcgtctccacatttatggagttcatcggtaataatcctaacgccttccggttattattgcgggaacgctccggcacctccgctgcgtttcgtgccgccgttgcgcgtgaaattcagcacttcattgcggaacttgcggactatctggaactcgaaaaccatatgccgcgtgcgtttactgaagcgcaagccgaagcaatggtgacaattgtcttcagtgcgggtgccgaggcgttggacgtcggcgtcgaacaacgtcggcaattagaagagcgactggtactgcaactgcgaatgattagcaaaggggcttattactggtatcgccgtgaacaagagaaaaccgcaattattccgggaaatgtgaaggacgagtaatgaaacaagcaaatcaagatagaggtacgctgctgctggcgttagttgctggcttaagcattaatggtactttcgcagcgctgtttagctccattgtgccattttctgtattcccgattatttccctggtgctgacggtttactgcctgcatcaacgttatcttaatcgcactatgccggtaggcttgccgggtctggcagctgcctgttttattctcggcgtactgctgtacagcacggtagttcgtgcggaatatccggatatcggctctaacttcttcccggcagtactctccgtcattatggtgttctggattggcgcgaagatgcgtaaccgtaagcaggaagttgctgagtaatcggtattatgccggatgctggcgcatccggcatgggttttacttcgcggtcagtaatacgccgcactccatatggtgcgtgtaggggaactgatcaaacagagccagacgttcgaccttgtgcgtctggcttaatgtttccagattcttgcataacgtttccgggttacaggagatgtacaaaatacgcggatacgcctgcaccattttctcggtttcactgtccagaccgctgcgcggagggtcgacaaaaatggtttcgcactgataactctttaagtcgatcccttgcaggcggttaaactcgcgcacaccattcatcgcctgagtaaattcttctgccgccatacgaataatttgtacgttatcaatatggttagctgcgatgttgtattgcgcagcagcaacgctcggcttagcgatttcggtggctaatacccgatcaaaattacgcgccagcgctaaactaaagttaccgttgccgcagtacagctccagtaaatcgcctttactgcctttggttacgtccagcgcccattccagcatctgaatattcatcgccgcgttcggctgggtaaagctgttttctacctgacggtagatcatctctttccctgcgaccggcagacgttcatcgatgtaatcctgatccagctcgattttggttttcgttgcccgaccaatcagatgcacattcagattctgcgcgcgcagtgcatcgcgcagggcctccgcttcctgacgccactcatcatccagcttcttatggtatagcagggaaaccaccgcctgattactcagtgtagtgaggtaatcaatctggaacaacttgtggcgcagaacgggattattacgcacacccgcaatcatcgccgtcatcaactggttgataagttcactggcggcggggaagctatccacgcggatgcggcttttggtttgttgatcgaaaatgatgtgatacaggtcatcgccatcgtgccagatgcggaactccgcgcgcatccggtaatgactgaccgggctgcgaaacacttccggaaccaggtcagaaaacggtgccatcatactttgcaaacgtaccactttttcggctaactgcgcttcatactgttctgttggaaggtgttcgggggtcatgatgtatcctgaaaaattaaagtacgcggcgattgtagggattgctcatcagatgtccagatcttgatgaattcctatttgtgagctacgtctggacagtaacttgttacaacctgtagcatccacttgccggtcctgtgagttaatagggaatccagtgcgaatctggagctgacgcgcagcggtaaggaaaggtgcgatgattgcgttatgcggacactgccattcggtgggaagtcatcatctcttagtatcttagatacccctccaagcccgaagacctgccggccaacgtcgcatctggttctcatcatcgcgtaatattgatgaaacctgcggcatccttcttctattgtggatgctttacaatgattaaaaaagctagcctgctgacggcgtgttccgtcacggcattttccgcttgggcacaggataccagcccggatactctcgtcgttactgctaaccgttttgaacagccgcgcagcactgtgcttgcaccaaccaccgttgtgacccgtcaggatatcgaccgctggcagagcaccagcgtcaatgatgtgctgcgccgtcttccgggcgtcgatatcacccaaaacggcggtagtggtcagctcagttctatttttattcgcggtacaaatgccagtcatgtgttggtgttaattgatggcgtacgcctgaatctggcgggggtgagtggttctgccgaccttagccagttccctattgcgcttgtccagcgtgttgaatatatccgtgggccgcgctccgctgtttatggttccgatgcaataggcggggtggtgaatatcatcacgacgcgcgatgaacccggaacggaaattagtgcagggtggggaagcaatagttatcagaactatgatgtctctacgcagcaacaactgggggataagacacgggtaacgctgttgggcgattatgcccatactcatggttatgatgttgttgcctatggtaataccggaacgcaagcgcagacagataacgatggttttttaagtaaaacgctttatggcgcgctggagcataactttactgatgcctggagcggctttgtgcgcggctatggctatgataaccgtaccaattatgacgcgtattattctcccggtagtccgttgctcgatacccgtaaactctatagccaaagttgggacgccgggctgcgctataacggcgaactgattaaaagtcaactcattaccagctatagccatagcaaagattacaactacgatccccattatggtcgttatgatagcagcgcgacgctcgatgagatgaagcaatacaccgtccagtgggcaaacaatgtcatcgttggtcacggtagtattggtgcgggtgtcgactggcagaaacagactacgacgccgggtacaggttatgttgaggatggatatgatcaacgtaataccggcatctatctgaccgggctgcaacaagtcggcgattttacctttgaaggcgcagcacgcagtgacgataacagtcagtttggtcgtcatggaacctggcaaaccagcgccggttgggaattcatcgaaggttatcgcttcattgcttcctacgggacatcttataaggcaccaaatctggggcaactgtatggcttctacggaaatccgaatctggacccggagaaaagcaaacagtgggaaggcgcgtttgaaggcttaaccgctggggtgaactggcgtatttccggatatcgtaacgatgtcagtgacttgatcgattatgatgatcacaccctgaaatattacaacgaagggaaagcgcggattaagggcgtcgaggcgaccgccaattttgataccggaccactgacgcatactgtgagttatgattatgtcgatgcgcgcaatgcgattaccgacacgccgttgttacgccgtgctaaacagcaggtgaaataccagctcgactggcagttgtatgacttcgactggggtattacttatcagtatttaggcactcgctatgataaggattacagttcttatccttatcaaaccgttaaaatgggcggtgtgagcttgtgggatcttgcggttgcgtatccggtcacctctcacctgacagttcgtggtaaaatagccaacctgttcgacaaagattatgagacagtctatggctaccaaactgcaggacgggaatacaccttgtctggcagctacaccttctgaaccacgtcccaccgtgctggtgtttgactccggcgtcggtgggttgagcgtctatgacgagatccggcatctcttaccggatctccattacatttatgctttcgataacgtcgctttcccgtatggcgaaaaaagcgaagcgtttattgttgagcgagtggtggcaattgtcaccgcggtgcaagaacgttatccccttgcgctggctgtggtcgcttgcaacactgccagtaccgttagtcttcctgcattacgcgaaaagttcgacttcccggttgttggtgtcgtgccggcgattaaacctgctgcacgtctgacggcaaatggcattgtcggattactggcaacccgcggaacagttaaacgttcttatactcatgagctgatcgcgcgtttcgctaatgaatgccagatagaaatgctgggcagcgcagagatggttgagttggctgaagcgaagctacatggcgaagatgtttctctggatgcactaaaacgtatcctacgcccgtggttaagaatgaaagagccgccagataccgttgtattgggttgcacccatttccctctactacaagaagaactgttacaagtgctgccagagggaacccggctggtggattctggcgcagcgattgctcgccgaacggcctggttgttagaacatgaagccccggatgcaaaatctgccgatgcgaatattgccttttgtatggcaatgacgccaggagctgaacaattattgcccgttttacagcgttacggcttcgaaacgctcgaaaaactggcagttttaggctgatttggttgaatgttgcgcggtcagaaaattattttaaatttcctcttgtcaggccggaataactccccataatgcgccaccactgacacggaacaacggcaaacacgccgccgggtcagcggggttctcctgagaactccggcagagaaagcaaaaataaatgcttgactctgtagcgggaaggcgtattatgcacaccccgcgccgctgagaaaaagcgaagcggcactgctctttaacaatttatcagacaatctgtgtgggcactcgaagatacggattcttaacgtcgcaagacgaaaaatgaataccaagtctcaagagtgaacacgtaattcattacgaagtttaattctttgagcgtcaaacttttaaattgaagagtttgatcatggctcagattgaacgctggcggcaggcctaacacatgcaagtcgaacggtaacaggaagaagcttgcttctttgctgacgagtggcggacgggtgagtaatgtctgggaaactgcctgatggagggggataactactggaaacggtagctaataccgcataacgtcgcaagaccaaagagggggaccttcgggcctcttgccatcggatgtgcccagatgggattagctagtaggtggggtaacggctcacctaggcgacgatccctagctggtctgagaggatgaccagccacactggaactgagacacggtccagactcctacgggaggcagcagtggggaatattgcacaatgggcgcaagcctgatgcagccatgccgcgtgtatgaagaaggccttcgggttgtaaagtactttcagcggggaggaagggagtaaagttaatacctttgctcattgacgttacccgcagaagaagcaccggctaactccgtgccagcagccgcggtaatacggagggtgcaagcgttaatcggaattactgggcgtaaagcgcacgcaggcggtttgttaagtcagatgtgaaatccccgggctcaacctgggaactgcatctgatactggcaagcttgagtctcgtagaggggggtagaattccaggtgtagcggtgaaatgcgtagagatctggaggaataccggtggcgaaggcggccccctggacgaagactgacgctcaggtgcgaaagcgtggggagcaaacaggattagataccctggtagtccacgccgtaaacgatgtcgacttggaggttgtgcccttgaggcgtggcttccggagctaacgcgttaagtcgaccgcctggggagtacggccgcaaggttaaaactcaaatgaattgacgggggcccgcacaagcggtggagcatgtggtttaattcgatgcaacgcgaagaaccttacctggtcttgacatccacggaagttttcagagatgagaatgtgccttcgggaaccgtgagacaggtgctgcatggctgtcgtcagctcgtgttgtgaaatgttgggttaagtcccgcaacgagcgcaacccttatcctttgttgccagcggtccggccgggaactcaaaggagactgccagtgataaactggaggaaggtggggatgacgtcaagtcatcatggcccttacgaccagggctacacacgtgctacaatggcgcatacaaagagaagcgacctcgcgagagcaagcggacctcataaagtgcgtcgtagtccggattggagtctgcaactcgactccatgaagtcggaatcgctagtaatcgtggatcagaatgccacggtgaatacgttcccgggccttgtacacaccgcccgtcacaccatgggagtgggttgcaaaagaagtaggtagcttaaccttcgggagggcgcttaccactttgtgattcatgactggggtgaagtcgtaacaaggtaaccgtaggggaacctgcggttggatcacctccttaccttaaagaagcgtactttgtagtgctcacacagattgtctgatagaaagtgaaaagcaaggcgtttacgcgttgggagtgaggctgaagagaataaggccgttcgctttctattaatgaaagctcaccctacacgaaaatatcacgcaacgcgtgataagcaattttcgtgtccccttcgtctagaggcccaggacaccgccctttcacggcggtaacaggggttcgaatcccctaggggacgccacttgctggtttgtgagtgaaagtcgccgaccttaatatctcaaaactcatcttcgggtgatgtttgagatatttgctctttaaaaatctggatcaagctgaaaattgaaacactgaacaacgagagttgttcgtgagtctctcaaattttcgcaacacgatgatgaatcgaaagaaacatcttcgggttgtgaggttaagcgactaagcgtacacggtggatgccctggcagtcagaggcgatgaaggacgtgctaatctgcgataagcgtcggtaaggtgatatgaaccgttataaccggcgatttccgaatggggaaacccagtgtgtttcgacacactatcattaactgaatccataggttaatgaggcgaaccgggggaactgaaacatctaagtaccccgaggaaaagaaatcaaccgagattcccccagtagcggcgagcgaacggggagcagcccagagcctgaatcagtgtgtgtgttagtggaagcgtctggaaaggcgcgcgatacagggtgacagccccgtacacaaaaatgcacatgctgtgagctcgatgagtagggcgggacacgtggtatcctgtctgaatatggggggaccatcctccaaggctaaatactcctgactgaccgatagtgaaccagtaccgtgagggaaaggcgaaaagaaccccggcgaggggagtgaaaaagaacctgaaaccgtgtacgtacaagcagtgggagcacgcttaggcgtgtgactgcgtaccttttgtataatgggtcagcgacttatattctgtagcaaggttaaccgaataggggagccgaagggaaaccgagtcttaactgggcgttaagttgcagggtatagacccgaaacccggtgatctagccatgggcaggttgaaggttgggtaacactaactggaggaccgaaccgactaatgttgaaaaattagcggatgacttgtggctgggggtgaaaggccaatcaaaccgggagatagctggttctccccgaaagctatttaggtagcgcctcgtgaattcatctccgggggtagagcactgtttcggcaagggggtcatcccgacttaccaacccgatgcaaactgcgaataccggagaatgttatcacgggagacacacggcgggtgctaacgtccgtcgtgaagagggaaacaacccagaccgccagctaaggtcccaaagtcatggttaagtgggaaacgatgtgggaaggcccagacagccaggatgttggcttagaagcagccatcatttaaagaaagcgtaatagctcactggtcgagtcggcctgcgcggaagatgtaacggggctaaaccatgcaccgaagctgcggcagcgacgcttatgcgttgttgggtaggggagcgttctgtaagcctgcgaaggtgtgctgtgaggcatgctggaggtatcagaagtgcgaatgctgacataagtaacgataaagcgggtgaaaagcccgctcgccggaagaccaagggttcctgtccaacgttaatcggggcagggtgagtcgacccctaaggcgaggccgaaaggcgtagtcgatgggaaacaggttaatattcctgtacttggtgttactgcgaaggggggacggagaaggctatgttggccgggcgacggttgtcccggtttaagcgtgtaggctggttttccaggcaaatccggaaaatcaaggctgaggcgtgatgacgaggcactacggtgctgaagcaacaaatgccctgcttccaggaaaagcctctaagcatcaggtaacatcaaatcgtaccccaaaccgacacaggtggtcaggtagagaataccaaggcgcttgagagaactcgggtgaaggaactaggcaaaatggtgccgtaacttcgggagaaggcacgctgatatgtaggtgaggtccctcgcggatggagctgaaatcagtcgaagataccagctggctgcaactgtttattaaaaacacagcactgtgcaaacacgaaagtggacgtatacggtgtgacgcctgcccggtgccggaaggttaattgatggggttagcgcaagcgaagctcttgatcgaagccccggtaaacggcggccgtaactataacggtcctaaggtagcgaaattccttgtcgggtaagttccgacctgcacgaatggcgtaatgatggccaggctgtctccacccgagactcagtgaaattgaactcgctgtgaagatgcagtgtacccgcggcaagacggaaagaccccgtgaacctttactatagcttgacactgaacattgagccttgatgtgtaggataggtgggaggctttgaagtgtggacgccagtctgcatggagccgaccttgaaataccaccctttaatgtttgatgttctaacgttgacccgtaatccgggttgcggacagtgtctggtgggtagtttgactggggcggtctcctcctaaagagtaacggaggagcacgaaggttggctaatcctggtcggacatcaggaggttagtgcaatggcataagccagcttgactgcgagcgtgacggcgcgagcaggtgcgaaagcaggtcatagtgatccggtggttctgaatggaagggccatcgctcaacggataaaaggtactccggggataacaggctgataccgcccaagagttcatatcgacggcggtgtttggcacctcgatgtcggctcatcacatcctggggctgaagtaggtcccaagggtatggctgttcgccatttaaagtggtacgcgagctgggtttagaacgtcgtgagacagttcggtccctatctgccgtgggcgctggagaactgaggggggctgctcctagtacgagaggaccggagtggacgcatcactggtgttcgggttgtcatgccaatggcactgcccggtagctaaatgcggaagagataagtgctgaaagcatctaagcacgaaacttgccccgagatgagttctccctgaccctttaagggtcctgaaggaacgttgaagacgacgacgttgataggccgggtgtgtaagcgcagcgatgcgttgagctaaccggtactaatgaaccgtgaggcttaaccttacaacgccgaagctgttttggcggatgagagaagattttcagcctgatacagattaaatcagaacgcagaagcggtctgataaaacagaatttgcctggcggcagtagcgcggtggtcccacctgaccccatgccgaactcagaagtgaaacgccgtagcgccgatggtagtgtggggtctccccatgcgagagtagggaactgccaggcatcaaataaaacgaaaggctcagtcgaaagactgggcctttcgttttatctgttgtttgtcggtgaacgctctcctgagtaggacaaatccgccgggagcggatttgaacgttgcgaagcaacggcccggagggtggcgggcaggacgcccgccataaactgccaggcatcaaattaagcagaaggccatcctgacggatggcctttttgcgtttctacaaactcttcctgtcgtcatatctacaagccatccccccacagatacggtaaactagcctcgtttttgcatcaggaaagcagctatgaaccactccttaaaaccctggaacacatttggcattgatcataatgctcagcacattgtatgtgccgaagacgaacaacaattactcaatgcctggcagtatgcaaccgcagaaggacaacccgttcttattctgggtgaaggaagtaatgtactttttctggaggactatcgcggcacggtgatcatcaaccggatcaaaggtatcgaaattcatgatgaacctgatgcgtggtatttacatgtaggagccggagaaaactggcatcgtctggtaaaatacactttgcaggaaggtatgcctggtctggaaaatctggcattaattcctggttgtgtcggcagtagtcctatccagaatattggtgcttatggcgtagaattacagcgagtttgcgcttatgttgattctgttgaactggcgacaggcaagcaagtgcgcttaactgccaaagagtgccgttttggctatcgcgacagtatttttaaacatgaataccaggaccgcttcgctattgtagccgtaggtctgcgtctgccaaaagagtggcaacctgtactaacgtatggtgacttaactcgtctggatcctacaacagtaacgccacagcaagtatttaatgcggtgtgtcatatgcgcaccaccaaactccctgatccaaaagtgaatggcaatgccggtagtttcttcaaaaaccctgttgtatctgccgaaacggctaaagcattactgagtcaatttccaacagcaccaaattacccccaggcggatggtagtgtaaaactggcagcaggttggcttatcgatcagtgccagctaaaagggatgcaaataggtggggctgcggtgcaccgtcaacaggcgttagttctcattaatgaagacaatgcaaaaagcgaagatgttgtacagctggcgcatcatgtaagacagaaagttggtgaaaaatttaatgtctggcttgagcctgaagtccgctttattggtgcaagtggtgaagtgagcgcagtggagacaattagttgaaataaagcgcagtggagacaatttcatgaaggataacaccgtgccactgaaattgattgccctgttagcgaacggtgaatttcactctggcgagcagttgggtgaaacgctgggaatgagccgggcggctattaataaacacattcagacactgcgtgactggggcgttgatgtctttaccgttccgggtaaaggatacagcctgcctgagcctatccagttacttaatgctaaacagatattgggtcagctggatggcggtagtgtagccgtgctgccagtgattgactccacgaatcagtaccttcttgatcgtatcggagagcttaaaagcggcgatgcttgcattgcagaataccagcaggctggccgtggtcgccggggtcggaaatggtttagcccttttggcgcaaacttatatttgagcatgttctggcgtctggaacaaggcccggcggcggcgattggtttaagtctggttatcggtatcgtgatggcggaagtattacgcaagctgggtgcagataaagttcgtgttaaatggcctaatgacctctatctgcaggatcgcaagctggcaggcattctggtggagctgactggcaaaactggcgatgcggcgcaaatagtcattggagccgggatcaacatggcaatgcgccgtgttgaagagagtgtcgttaatcaggggtggatcacgctgcaggaagcggggatcaatctcgatcgtaatacgttggcggccatgctaatacgtgaattacgtgctgcgttggaactcttcgaacaagaaggattggcaccttatctgagccgctgggaaaagctggataattttattaatcgcccagtgaaacttatcattggtgataaagaaatatttggcattagtcgcggaatagacaaacagggggctttattacttgagcaggatggaataataaaaccctggatgggcggtgaaatatccctgcgtagtgcagaaaaataagaaaggggagtattcgctcccctgcaaattatttgcgtagtctgacctcttctaccgcatgattagcacttttcgtcaggattaaactggcgcgctcacgagtaggtagaatattttgctttaagttcagccagttgatctctttccacaatgtcatggcagtcttaatcgcttcttctttagttaatttcgcgtagttatgaaaataggaatccgggtcggtaaaagccccttcgcggaatttcagaaaacggttgatataccatgtctgaagtaagtcttccggtgcatcaacatatatgctaaaatcgacaaaatcagaaacaaatacatgatgtggatcgtgtggataatccatcccgctctgtaagacatttaacccttcaagaattaaaatatcaggctgaacaaccgttttatctccatccgggatcacatcataaataagatgactgtaaacaggtgctgtaacgtttggcacgccggatttgagatcggaaacaaacttcaccaggcgatgcatatcatagctttccgggaagcctttcttcttcatcagaccacgttctttcagaacctgattagggtgaaggaagccatctgtagtgatcagttcaacacgacgatgttccggccaacggcttaatagcgcctgcaatacacgggcggttgtacttttccccaccgcgacactgccagcaatactgataatgtaaggaatgcgttgcccgttggtaccaagaaactgttccagaactgcctgacggcgcagattgctgcttatatagaagttcagcaaacgactcaaaggtaaatagatctcggcaacttcttctaagctgagatcttcattaatacctttgagacgggcgatctcatcttcgcttaacgtcataggtacggaatcacgcagagctgcccactggttgcggtcaaactgtaggtaaggcgtcattaacgtttgctcttttatactcataagcatgtttctggcggtcatagctctatcggcaaagcgatatttgccatggcgcgtcacagttctgttgaatgggttaatgggcaggagggtaacaccagatggggaggaataataagaaaaaatctctgccaggaagctatcgttgaaaagcaatgtgacagatattccatctgataaaaagaattatggtttagcaggagcgcattgttgagcacaatgatgttgaaaaagtgtgctaatctgccctccgttcggctgtttcttcatcgtgtcgcataaaatgtgaccaataaaacaaattatgcaattttttagttgcatgaactcgcatgtctccatagaatgcgcgctacttgatgccgacttagctcagtaggtagagcaactgacttgtaatcagtaggtcaccagttcgattccggtagtcggcaccatcaagtccggtggggttcccgagcggccaaagggagcagactgtaaatctgccgtcacagacttcgaaggttcgaatccttcccccaccaccaatttcggccacgcgatggcgtagcccgagacgataagttcgcttaccggctcgaataaagagagcttctctcgatattcagtgcagaatgaaaatcaggtagccgagttccaggatgcgggcatcgtataatggctattacctcagccttccaagctgatgatgcgggttcgattcccgctgcccgctccaagatgtgctgatatagctcagttggtagagcgcacccttggtaagggtgaggtcggcagttcgaatctgcctatcagcaccacttcttttctcctccctgttttttccttctgtttattgcattcaacaagtcgggcatgttgcctggttgatgtggtgatatcaccgatttatccgtgtcttagagggacaatcgatgtctaaagaaaagtttgaacgtacaaaaccgcacgttaacgtcggtactatcggccacgttgaccatggtaaaacaacgctgaccgctgcaatcactaccgtactggctaaaacctacggcggtgctgctcgcgcattcgaccagatcgataacgcgccggaagaaaaagctcgtggtatcaccatcaacacttctcacgttgaatacgacaccccgacccgccactacgcacacgtagactgcccggggcacgccgactatgttaaaaacatgatcaccggtgctgcgcagatggacggcgcgatcctggtagttgctgcgactgacggcccgatgccgcagactcgtgagcacatcctgctgggtcgtcaggtaggcgttccgtacatcatcgtgttcctgaacaaatgcgacatggttgatgacgaagagctgctggaactggttgaaatggaagttcgtgaacttctgtctcagtacgacttcccgggcgacgacactccgatcgttcgtggttctgctctgaaagcgctggaaggcgacgcagagtgggaagcgaaaatcctggaactggctggcttcctggattcttacattccggaaccagagcgtgcgattgacaagccgttcctgctgccgatcgaagacgtattctccatctccggtcgtggtaccgttgttaccggtcgtgtagaacgcggtatcatcaaagttggtgaagaagttgaaatcgttggtatcaaagagactcagaagtctacctgtactggcgttgaaatgttccgcaaactgctggacgaaggccgtgctggtgagaacgtaggtgttctgctgcgtggtatcaaacgtgaagaaatcgaacgtggtcaggtactggctaagccgggcaccatcaagccgcacaccaagttcgaatctgaagtgtacattctgtccaaagatgaaggcggccgtcatactccgttcttcaaaggctaccgtccgcagttctacttccgtactactgacgtgactggtaccatcgaactgccggaaggcgtagagatggtaatgccgggcgacaacatcaaaatggttgttaccctgatccacccgatcgcgatggacgacggtctgcgtttcgcaatccgtgaaggcggccgtaccgttggcgcgggcgttgtagcaaaagttctgagctaattgccgataacatttgacgcaatgcgcactaaaagggcatcatttgatgccctttttgcacgctttcgtaccagaacctggctcatcagtgattttctttgtcataatcattgctgagacaggctctgttgagggcgtataatccgaaaagctaatacgcgtttcgatttggtttgcctcgcgatcgcggggtgaaaatgtttgtagaaaacttctgacaggttggtttatgagtgcgaataccgaagctcaaggaagcgggcgcggcctggaagcgatgaagtgggtcgttgtggtggcattgctcctggtggcgattgtcggcaactatctttatcgcgacattatgctgccgctgcgtgcgctggccgtagtaattctgattgctgcagcgggtggtgtcgcgctgttaacgacaaaaggtaaagctaccgttgcttttgcccgtgaagcgcgtaccgaagtccgtaaggtcatttggccgactcgccaggaaacattgcacaccacgctgattgtggctgcggttaccgcagtaatgagtctgatcctgtggggactggatggtattctggttcgcctggtatcctttatcactggcctgaggttctgagatgtctgaagctcctaaaaagcgctggtacgtcgttcaggcgttttccggttttgaaggccgcgtagcaacgagcctgcgtgagcatatcaaattacacaacatggaagatttgtttggtgaagtcatggtaccaaccgaagaagtggttgaaatccgtggcggtcagcgtcgcaaaagcgaacgtaaattcttccctggctacgtcctcgttcagatggtgatgaacgacgcgagctggcacctggtgcgcagcgtaccgcgtgtgatgggcttcatcggcggtacttccgatcgtcctgcgccaatcagcgataaagaagtcgatgcgattatgaaccgcctgcagcaggttggtgataagccgcgtccgaaaacgctgtttgaaccgggtgaaatggtccgtgttaatgatggtccgttcgctgacttcaacggtgttgttgaagaagtggattacgagaaatctcgtctgaaagtgtctgtttctatcttcggtcgtgcgaccccggtagagctggacttcagccaggttgaaaaagcctaacccagcgatcaaaaaagcggcgatttaatcgttgcacaaggcgtgagattggaatacaatttcgcgccttttgtttttatgggccttgcccgtaaaacgattttttatatcacggggagcctctcagaggcgttattacccaacttgaggaatttataatggctaagaaagtacaagcctatgtcaagctgcaggttgcagctggtatggctaacccgagtccgccagtaggtccggctctgggtcagcagggcgtaaacatcatggaattctgcaaagcgttcaacgcaaaaactgattccatcgaaaaaggtctgccgattccggtagtaatcaccgtttacgctgaccgttctttcactttcgttaccaagaccccgccggcagcagttctgctgaaaaaagcggctggtatcaagtctggttccggtaagccgaacaaagacaaagtgggtaaaatttcccgcgctcagctgcaggaaatcgcgcagaccaaagctgccgacatgactggtgccgacattgaagcgatgactcgctccatcgaaggtactgcacgttccatgggcctggtagtggaggactaagaaatggctaaactgaccaagcgcatgcgtgttatccgcgagaaagttgatgcaaccaaacagtacgacatcaacgaagctatcgcactgctgaaagagctggcgactgctaaattcgtagaaagcgtggacgtagctgttaacctcggcatcgacgctcgtaaatctgaccagaacgtacgtggtgcaactgtactgccgcacggtactggccgttccgttcgcgtagccgtatttacccaaggtgcaaacgctgaagctgctaaagctgcaggcgcagaactggtaggtatggaagatctggctgaccagatcaagaaaggcgaaatgaactttgacgttgttattgcttctccggatgcaatgcgcgttgttggccagctgggccaggttctgggtccgcgcggcctgatgccaaacccgaaagtgggtactgtaacaccgaacgttgctgaagcggttaaaaacgctaaagctggccaggttcgttaccgtaacgacaaaaacggcatcatccacaccaccatcggtaaagtggactttgacgctgacaaactgaaagaaaacctggaagctctgctggttgcgctgaaaaaagcaaaaccgactcaggcgaaaggcgtgtacatcaagaaagttagcatctccaccaccatgggtgcaggtgttgcagttgaccaggctggcctgagcgcttctgtaaactaatgcctttacgtgggcggtgattttgtctacaatcttacccccacgtataatgcttaatgcagacgtatatccgagatattcgggttgtggcaaggcggcaactgagtgagtcgccaggagcatagctaactatgtgactggtgcgaatgaaggaagccaacgccgtcacaagctgaatagcgacggatagaaaagatttgttcgttggagcctggcctatccaggcctccgtcgaagaccgcaggagtttcgcaagaaacttaatcccctgcgtagacggtgacagaacgctaagattattcttttatattctggcttgtttctgctcaccgtaattaagacgctctctccgtttggaggagtgaagtgagttccagagattttctctggcaaacatccaggagcaaagctaatggctttaaatcttcaagacaaacaagcgattgttgctgaagtcagcgaagtagccaaaggcgcgctgtctgcagtagttgcggattcccgtggcgtaactgtagataaaatgactgaactgcgtaaagcaggtcgcgaagctggcgtatacatgcgtgttgttcgtaacaccctgctgcgccgtgctgttgaaggtactccgttcgagtgcctgaaagacgcgtttgttggtccgaccctgattgcatactctatggaacacccgggcgctgctgctcgtctgttcaaagagttcgcgaaagcgaatgcaaaatttgaggtcaaagccgctgcctttgaaggtgagctgatcccggcgtctcagatcgaccgcctggcaactctgccgacctacgaagaagcaattgcacgcctgatggcaaccatgaaagaagctagcgctggcaaactggttcgtactctggctgctgtacgcgatgcgaaagaagctgcttaatcgcagttatctttttaacgcattcgcttacgtataaacttattctgatattcaggaacaatttaaatgtctatcactaaagatcaaatcattgaagcagttgcagctatgtctgtaatggacgttgtagaactgatctctgcaatggaagaaaaattcggtgtttccgctgctgctgctgtagctgtagctgctggcccggttgaagctgctgaagaaaaaactgaattcgacgtaattctgaaagctgctggcgctaacaaagttgctgttatcaaagcagtacgtggcgcaactggcctgggtctgaaagaagctaaagacctggtagaatctgcaccggctgctctgaaagaaggcgtgagcaaagacgacgcagaagcactgaaaaaagctctggaagaagctggcgctgaagttgaagttaaataagccaacccttccggttgcagcctgagaaatcaggctgatggctggtgactttttagtcaccagcctttttgcgctgtaaggcgccagtagcgtttcacactgtttgactactgctgtgcctttcaatgcttgtttctatcgacgacttaatatactgcgacaggacgtccgttctgtgtaaatcgcaatgaaatggtttaagcgtgatagcaacaggcattgcggaaagtgttccattttccggtcaacaaaatagtgttgcacaaactgtccgctcaatggacagatgggtcgacttgtcagcgagctgaggaaccctatggtttactcctataccgagaaaaaacgtattcgtaaggattttggtaaacgtccacaagttctggatgtaccttatctcctttctatccagcttgacagctttcagaaatttatcgagcaagatcctgaagggcagtatggtctggaagctgctttccgttccgtattcccgattcagagctacagcggtaattccgagctgcaatacgtcagctaccgccttggcgaaccggtgtttgacgtccaggaatgtcaaatccgtggcgtgacctattccgcaccgctgcgcgttaaactgcgtctggtgatctatgagcgcgaagcgccggaaggcaccgtaaaagacattaaagaacaagaagtctacatgggcgaaattccgctcatgacagacaacggtacctttgttatcaacggtactgagcgtgttatcgtttcccagctgcaccgtagtccgggcgtcttctttgactccgacaaaggtaaaacccactctagcggtaaagtgctgtataacgcgcgtatcatcccttaccgtggttcctggctggacttcgaattcgatccgaaggacaacctgttcgtacgtatcgaccgtcgccgtaaactgcctgcgaccatcattctgcgcgccctgaactacaccacagagcagatcctcgacctgttctttgaaaaagttatctttgaaatccgtgataacaagctgcagatggaactggtgccggaacgcctgcgtggtgaaaccgcatcttttgacatcgaagctaacggtaaagtgtacgtagaaaaaggccgccgtatcactgcgcgccacattcgccagctggaaaaagacgacgtcaaactgatcgaagtcccggttgagtacatcgcaggtaaagtggttgctaaagactatattgatgagtctaccggcgagctgatctgcgcagcgaacatggagctgagcctggatctgctggctaagctgagccagtctggtcacaagcgtatcgaaacgctgttcaccaacgatctggatcacggcccatatatctctgaaaccttacgtgtcgacccaactaacgaccgtctgagcgcactggtagaaatctaccgcatgatgcgccctggcgagccgccgactcgtgaagcagctgaaagcctgttcgagaacctgttcttctccgaagaccgttatgacttgtctgcggttggtcgtatgaagttcaaccgttctctgctgcgcgaagaaatcgaaggttccggtatcctgagcaaagacgacatcattgatgttatgaaaaagctcatcgatatccgtaacggtaaaggcgaagtcgatgatatcgaccacctcggcaaccgtcgtatccgttccgttggcgaaatggcggaaaaccagttccgcgttggcctggtacgtgtagagcgtgcggtgaaagagcgtctgtctctgggcgatctggataccctgatgccacaggatatgatcaacgccaagccgatttccgcagcagtgaaagagttcttcggttccagccagctgtctcagtttatggaccagaacaacccgctgtctgagattacgcacaaacgtcgtatctccgcactcggcccaggcggtctgacccgtgaacgtgcaggcttcgaagttcgagacgtacacccgactcactacggtcgcgtatgtccaatcgaaacccctgaaggtccgaacatcggtctgatcaactctctgtccgtgtacgcacagactaacgaatacggcttccttgagactccgtatcgtaaagtgaccgacggtgttgtaactgacgaaattcactacctgtctgctatcgaagaaggcaactacgttatcgcccaggcgaactccaacttggatgaagaaggccacttcgtagaagacctggtaacttgccgtagcaaaggcgaatccagcttgttcagccgcgaccaggttgactacatggacgtatccacccagcaggtggtatccgtcggtgcgtccctgatcccgttcctggaacacgatgacgccaaccgtgcattgatgggtgcgaacatgcaacgtcaggccgttccgactctgcgcgctgataagccgctggttggtactggtatggaacgtgctgttgccgttgactccggtgtaactgcggtagctaaacgtggtggtgtcgttcagtacgtggatgcttcccgtatcgttatcaaagttaacgaagacgagatgtatccgggtgaagcaggtatcgacatctacaacctgaccaaatacacccgttctaaccagaacacctgtatcaaccagatgccgtgtgtgtctctgggtgaaccggttgaacgtggcgacgtgctggcagacggtccgtccaccgacctcggtgaactggcgcttggtcagaacatgcgcgtagcgttcatgccgtggaatggttacaacttcgaagactccatcctcgtatccgagcgtgttgttcaggaagaccgtttcaccaccatccacattcaggaactggcgtgtgtgtcccgtgacaccaagctgggtccggaagagatcaccgctgacatcccgaacgtgggtgaagctgcgctctccaaactggatgaatccggtatcgtttacattggtgcggaagtgaccggtggcgacattctggttggtaaggtaacgccgaaaggtgaaactcagctgaccccagaagaaaaactgctgcgtgcgatcttcggtgagaaagcctctgacgttaaagactcttctctgcgcgtaccaaacggtgtatccggtacggttatcgacgttcaggtctttactcgcgatggcgtagaaaaagacaaacgtgcgctggaaatcgaagaaatgcagctcaaacaggcgaagaaagacctgtctgaagaactgcagatcctcgaagcgggtctgttcagccgtatccgtgctgtgctggtagccggtggcgttgaagctgagaagctcgacaaactgccgcgcgatcgctggctggagctgggcctgacagacgaagagaaacaaaatcagctggaacagctggctgagcagtatgacgaactgaaacacgagttcgagaagaaactcgaagcgaaacgccgcaaaatcacccagggcgacgatctggcaccgggcgtgctgaagattgttaaggtatatctggcggttaaacgccgtatccagcctggtgacaagatggcaggtcgtcacggtaacaagggtgtaatttctaagatcaacccgatcgaagatatgccttacgatgaaaacggtacgccggtagacatcgtactgaacccgctgggcgtaccgtctcgtatgaacatcggtcagatcctcgaaacccacctgggtatggctgcgaaaggtatcggcgacaagatcaacgccatgctgaaacagcagcaagaagtcgcgaaactgcgcgaattcatccagcgtgcgtacgatctgggcgctgacgttcgtcagaaagttgacctgagtaccttcagcgatgaagaagttatgcgtctggctgaaaacctgcgcaaaggtatgccaatcgcaacgccggtgttcgacggtgcgaaagaagcagaaattaaagagctgctgaaacttggcgacctgccgacttccggtcagatccgcctgtacgatggtcgcactggtgaacagttcgagcgtccggtaaccgttggttacatgtacatgctgaaactgaaccacctggtcgacgacaagatgcacgcgcgttccaccggttcttacagcctggttactcagcagccgctgggtggtaaggcacagttcggtggtcagcgtttcggggagatggaagtgtgggcgctggaagcatacggcgcagcatacaccctgcaggaaatgctcaccgttaagtctgatgacgtgaacggtcgtaccaagatgtataaaaacatcgtggacggcaaccatcagatggagccgggcatgccagaatccttcaacgtattgttgaaagagattcgtagcctgggtatcaacatcgaactggaagacgagtaattctcgctcaaacaggtcactgctgtcgggttaaaacccggcagcggattgtgctaactccgacgggagcaaatccgtgaaagatttattaaagtttctgaaagcgcagactaaaaccgaagagtttgatgcgatcaaaattgctctggctagcccagacatgatccgtagttggtctttcggtgaagttaaaaagccggaaaccatcaactaccgtacgttcaaaccagaacgtgacggccttttctgcgcccgtatctttgggccggtaaaagattacgagtgcctgtgcggtaagtacaagcgcctgaaacaccgtggcgtcatctgtgagaagtgcggcgttgaagtgacccagactaaagtacgccgtgagcgtatgggccacatcgaactggcttccccgactgcgcacatctggttcctgaaaagcctgccgtcccgtatcggtctgctgctcgatatgccgctgcgcgatatcgaacgcgtactgtactttgaatcctatgtggttatcgaaggcggtatgaccaacctggaacgtcagcagatcctgactgaagagcagtatctggacgcgctggaagagttcggtgacgaattcgacgcgaagatgggggcggaagcaatccaggctctgctgaagagcatggatctggagcaagagtgcgaacagctgcgtgaagagctgaacgaaaccaactccgaaaccaagcgtaaaaagctgaccaagcgtatcaaactgctggaagcgttcgttcagtctggtaacaaaccagagtggatgatcctgaccgttctgccggtactgccgccagatctgcgtccgctggttccgctggatggtggtcgtttcgcgacttctgacctgaacgatctgtatcgtcgcgtcattaaccgtaacaaccgtctgaaacgtctgctggatctggctgcgccggacatcatcgtacgtaacgaaaaacgtatgctgcaggaagcggtagacgccctgctggataacggtcgtcgcggtcgtgcgatcaccggttctaacaagcgtcctctgaaatctttggccgacatgatcaaaggtaaacagggtcgtttccgtcagaacctgctcggtaagcgtgttgactactccggtcgttctgtaatcaccgtaggtccatacctgcgtctgcatcagtgcggtctgccgaagaaaatggcactggagctgttcaaaccgttcatctacggcaagctggaactgcgtggtcttgctaccaccattaaagctgcgaagaaaatggttgagcgcgaagaagctgtcgtttgggatatcctggacgaagttatccgcgaacacccggtactgctgaaccgtgcaccgactctgcaccgtctgggtatccaggcatttgaaccggtactgatcgaaggtaaagctatccagctgcacccgctggtttgtgcggcatataacgccgacttcgatggtgaccagatggctgttcacgtaccgctgacgctggaagcccagctggaagcgcgtgcgctgatgatgtctaccaacaacatcctgtccccggcgaacggcgaaccaatcatcgttccgtctcaggacgttgtactgggtctgtactacatgacccgtgactgtgttaacgccaaaggcgaaggcatggtgctgactggcccgaaagaagcagaacgtctgtatcgctctggtctggcttctctgcatgcgcgcgttaaagtgcgtatcaccgagtatgaaaaagatgctaacggtgaattagtagcgaaaaccagcctgaaagacacgactgttggccgtgccattctgtggatgattgtaccgaaaggtctgccttactccatcgtcaaccaggcgctgggtaaaaaagcaatctccaaaatgctgaacacctgctaccgcattctcggtctgaaaccgaccgttatttttgcggaccagatcatgtacaccggcttcgcctatgcagcgcgttctggtgcatctgttggtatcgatgacatggtcatcccggagaagaaacacgaaatcatctccgaggcagaagcagaagttgctgaaattcaggagcagttccagtctggtctggtaactgcgggcgaacgctacaacaaagttatcgatatctgggctgcggcgaacgatcgtgtatccaaagcgatgatggataacctgcaaactgaaaccgtgattaaccgtgacggtcaggaagagaagcaggtttccttcaacagcatctacatgatggccgactccggtgcgcgtggttctgcggcacagattcgtcagcttgctggtatgcgtggtctgatggcgaagccggatggctccatcatcgaaacgccaatcaccgcgaacttccgtgaaggtctgaacgtactccagtacttcatctccacccacggtgctcgtaaaggtctggcggataccgcactgaaaactgcgaactccggttacctgactcgtcgtctggttgacgtggcgcaggacctggtggttaccgaagacgattgtggtacccatgaaggtatcatgatgactccggttatcgagggtggtgacgttaaagagccgctgcgcgatcgcgtactgggtcgtgtaactgctgaagacgttctgaagccgggtactgctgatatcctcgttccgcgcaacacgctgctgcacgaacagtggtgtgacctgctggaagagaactctgtcgacgcggttaaagtacgttctgttgtatcttgtgacaccgactttggtgtatgtgcgcactgctacggtcgtgacctggcgcgtggccacatcatcaacaagggtgaagcaatcggtgttatcgcggcacagtccatcggtgaaccgggtacacagctgaccatgcgtacgttccacatcggtggtgcggcatctcgtgcggctgctgaatccagcatccaagtgaaaaacaaaggtagcatcaagctcagcaacgtgaagagcgttgtgaactccagcggtaaactggttatcacttcccgtaatactgaactgaaactgatcgacgaattcggtcgtactaaagaaagctacaaagtaccttacggtgcggtactggcgaaaggcgatggcgaacaggttgctggcggcgaaaccgttgcaaactgggacccgcacaccatgccggttatcaccgaagtaagcggttttgtacgctttactgacatgatcgacggccagaccattacgcgtcagaccgacgaactgaccggtctgtctagcctggtggttctggattccgcagaacgtaccgcaggtggtaaagatctgcgtccggcactgaaaatcgttgatgctcagggtaacgacgttctgatcccaggtaccgatatgccagcgcagtacttcctgccgggtaaagcgattgttcagctggaagatggcgtacagatcagctctggtgacaccctggcgcgtattccgcaggaatccggcggtaccaaggacatcaccggtggtctgccgcgcgttgcggacctgttcgaagcacgtcgtccgaaagagccggcaatcctggctgaaatcagcggtatcgtttccttcggtaaagaaaccaaaggtaaacgtcgtctggttatcaccccggtagacggtagcgatccgtacgaagagatgattccgaaatggcgtcagctcaacgtgttcgaaggtgaacgtgtagaacgtggtgacgtaatttccgacggtccggaagcgccgcacgacattctgcgtctgcgtggtgttcatgctgttactcgttacatcgttaacgaagtacaggacgtataccgtctgcagggcgttaagattaacgataaacacatcgaagttatcgttcgtcagatgctgcgtaaagctaccatcgttaacgcgggtagctccgacttcctggaaggcgaacaggttgaatactctcgcgtcaagatcgcaaaccgcgaactggaagcgaacggcaaagtgggtgcaacttactcccgcgatctgctgggtatcaccaaagcgtctctggcaaccgagtccttcatctccgcggcaagcttccaggagaccactcgcgtgctgaccgaagcagccgttgcgggcaaacgcgacgaactgcgcggcctgaaagagaacgttatcgtgggtcgtctgatcccggcaggtaccggttacgcgtaccaccaggatcgtatgcgtcgccgtgctgcgggtgaagctccggctgcaccgcaggtgactgcagaagacgcatctgccagcctggcagaactgctgaacgcaggtctgggcggttctgataacgagtaatcgttaatccgcaaataacgtaaaaacccgcttcggcgggtttttttatggggggagtttagggaaagagcatttgtcagaatatttaaggaatttctgaatactcataatcaatgtagagatgactaatatcctgaaactgactgaactaattgagtcaaactcggcaaggattcgatactattcctgtgtaactttcttaaggaacgagaatgaaacaggaagtggaaaagtggcgaccttttggacatccggatggtgatattcgtgatttaagttttcttgatgctcatcaggctgtctacgttcagcatcatgagggcaaagagcctttagagtatcgcttttgggttacctactctcttcactgcttcacaaaagattatgaacatcagacgaacgaagaaaaacaaagcttaatgtaccacgcgcctaaagaatctcgtcccttctgccagcaccgttataacttagcgcgcacacacttaaaaagaactattttggcgctgccagaaagcaacgttattcatgccgggtatggtagctatgccgtgattgaggtggacttagacggaggagataaggcattttactttgttgcgttcagggctttcagggaaaagaaaaaactccgtttgcatgtaactagcgcttatcccatttctgaaaaacagaaaggtaaaagtgtgaaatttttcaccattgcctacaacttattgagaaataagcagcttcctcagcccagtaaataacaaaacccaccttaaggtgggtttcgccagagaattatctctggtattcagaacgccattaccggactttgccttgaccttgcgataatcgcaggttgcgggatgtctgaatttcttcagtctgctgcatcctggaagatgagaacatgtgttcttattttcgtctctatcatagttgagtatttactctcttacaatcagatctctttcattgctcaacaggcgatggcttcagactttgcattacggaatttttaagaaaggcagggcgaaacgaggaagaagcttttcgccctggacaacattcctgctgacggcactaccataaaaaaacacaacgctttcaacaaccttgcgtttttcatcttccgtagcggctcggaataaatttacgttcttacattccgtctcatagtctttggctggcgcgtcccagatagctgtcccagtctttccataccggctgcaaaccctgagcggttaacgcggcagcaaccgcttccggtctgcgatcgtcgtgcggactgaactgttccaactcggggtgattatcggcatagccacctggctgcgttttgctgaaggcgctgacgttattgatcgccagcggaataacgcgatcgcgaaaccacggactttcccgcgtggagagactcagttcaatctccggtgcaagcagtcggaaggcgcagatggtttgcactaactggcgttcatccataatgctcgcaggctcaatgccgccagtacacgggcgcaggcgcggaaaggagacagagtaacggctttgccagtaatgctgttgcagccatagcaaatgttcggcaaccatatagctgtcaacgcgccagttgtcggaaaggccaattagcgcgccgaggcctatcttatcaatccccgcacgccccagccgatccggcgtttccagccgccagaagaagtcctgttttttgcctttcagatgatggcgggcataagtcgcctcgtgatatgtctcctgataaaccatcacgccatccagaccaagttgctttaactcggcgtattccgtctccgccagcggttgcacttccatctgtagactagagaactgttcacgaagggcagggagatgacgacgaaagtaatccatccccactttcgcctgatgttcaccagtgactaacagcagatgttcaaagcccatctcccgtatagcggcactttccctggcaatatccgcttcatccagcgttttgcgcttgatgcgattactcatggaaaatccacagtacgtgcagtcgttagcgcaaagattggaaagataaagcgggacgtagaaactaactgtgttgccaaatcgctgacgggtcagacgctgcgcccgttgggccagttgttccagatagccactggcggcagggcttaacagcgccatcatgtcgtcgcgggtgagttggctggcatttagcgcccgctctacgtcagcagccgttttgccgttgatacgcaggcggatgtcgtcccagtccagttgtcgccagcgatcgctgaaggttttcatgcgcttgcctccagaaatccggtcagcgggctggtggcatgagcaaaataactgcggctgcccggtccggactgacgtgccagtaggcctgcttctaccgccagacgaaatgccttcgccatgttgacgggatcgtccgcgacggcaatcgccgtattcactaacaccgcgtcggcccccatttccagcgcctgcgcggcatggctgggaacgccgatgccagcatcgacaaccaccggcactgtggcctgctggataataatctccagcatggcgcgggtttccagtccctgattgctgccaatcggcgcgccgagcggcatcaccgctgcacagccgacttcttccagacgtttacacaataccggatcggccccgcagtaaggcagcacgacaaatccctgttgtaccagcgtttcggcggctttcagggtttcgatgggatcgggcaacagccagcgggcgtcagggtgaatctctaattttaaccagtttgtgcctaacgcttcacgagccagatgggcggcgaaaatggcttcttccgctgttttcgccccggatgtatttggcagcagggtcacacccgccgcgataagcggttcgaggatagcgtcgttgtgctggcgcaagtcgacacgtttcatcgccagtgtcaccagctggctgccggaagcgcggatcgcctccaccatcagttgactagaagcgaatttccctgtgccggtaaacagatgactatcaaacgttttgtccgcaatacgtaacatttcaaccccctgcaataacctgaaaaagcaggatctggtcgccatcctgcacgatatgttgcgcccactgctcacgcgggacgatttgctgattaatcgccagagccgcgcccgcttgtcgttggtcgagttgctccagtagttcgtgaacagtttgcccggcggcgcactgcatcgcttgatcgttaaacaggatctgcattgcttcctccgcataccgggcaaccactggcgcggcgcaacgccaggctgcgccactggctgcttttaccgtcgaacagtcggagttctcccgcaggtgtctctataccgcttaataacttaatggcttccagtgcctgcaaagtgcccataaccccgaccaccgggccaaccacgcccgccgtgcggcagttgcgttctggctcctggttatctggccacaggcagcggtaacacccctgctcccagggcggcgtcagtaccatcaactgaccgccaaatccgaccgcgctggcggtgataagcggcgtgttgagtgccacgcaggcggcattaatctcctggcgagtcgccatattgtcggtacagtcgagcaccacatcggcccgtgcaaccgcatcttttaacgcctcacccgttaaccgttgttgtaatgctgtcagttgaatgtcgggattcaactgtgtcagtcgctgttggctgacctggcttttcgggcgatcgatatcttcagtggtaaagaggatttgtcgttgcagattgcttaaatgcacatcgtcgtcatctgccagtaccagcgtcccgacgccagcgcccgccaggtacagcgcagcaggtgtacccagcccgcccagaccgataatcagcacctggctgtcgagcagtttttgctgcccgtccagagcgatatcgtcgagcaggatttggcggctataacgcataaagtcacggtcattcatcgccaactcctgcaatttccagcaactgtgccgttgccaaacgccagtctgcggcttgagtaatggcgctgacgacggcgatactgccgacacccgttgctatcaccgcaggcgcgcgtgccagactgataccgccaatcgccacggtgggataatccgccagtcgctcaacatgccgtgccagctgttccagcccctgcggtgcagaaggcatctgtttggtttgcgtcgggaacacatgtcccagcgcgatataagaggggcgtgctgccagcgcgacgtcgatttccatatcgtcatgtgtgctaacgcccagccgcaggcctgccgcgcggatggcattgagatcggtggcttgcaaatcttcctgccccaaatggacgccatacgcctgatgcttgatcgccagccgccagtaatcgttgataaacaatcgcgcgttatagcggcggcccagcgcaattgccgccacgacatcggcttccacctcttcatcgcgccgatctttgatgcgtagctggagagtacgtacgcctgcatccaacagacgttcgatccactgtacgctgtccaccaccgggtacagtccactacgaaaaggtacaggaggaaaatcaggctgatacatcacgcttcctccttacgcaggtagatttctccgcctctggcacggaagttctcgctcatatccgccattcccatttcaatagtttgcgtggcggcgtaatcacgcacttcctggctgattttcatgctgcagaatttcggcccacacatggagcaaaaatgggcgactttaccactctcttgcggcagggtttcatcgtgataagcgcgggcggtaaacgggtcgagggccagattaaactggtcttcccagcgaaattcgaagcgggctttgctcatggcgttatcgcgaatttgcgcgcccggatgccctttcgccaggtcagcggcgtgggcagcaatcttataggtgataagcccctgcttaacatcttctttattgggcagacccagatgctcttttggcgttacgtaacagagcatcgcgcagccaaaccagccaatcatcgccgcaccaatcccgctcgtgaagtggtcatagcccggcgcaatatcggtagttagcggccccagagtgtaaaacggcgcttcgtggcagtgctctaactcctcggtcatattgcggcggatcatctgcatcggcacgtggcctgggccttcaatcatcacctgcacgtcatattcccaggcaattttggtcagttcgcccagcgtatgcagctcggcaaactgcgcttcatcgttggcgtcctgaatagaaccggggcgcagaccgtcgcccaggctcaggctaacgtcataagcggcacagatttcacaaatttcgcggaagtgttgatagaggaaattttcctgatgatgggagaggcaccatttcgccataatgctaccgccgcgagagacgataccggtcaggcgtttcgcggtcatcggcacatagcgcagcagtacgcccgcatggatagtgaagtaatccacaccttgctcggcctgttccagcagcgtgtcgcggaacgcttcccaggtaagatcttcggcgatcccgttaaccttctccagcgcctggtagatcggcactgtaccgatcggcaccgggctgttacgcaaaatccactcgcgggtttcgtgaatatagcgaccggtggagagatccatcaccgtatccgctccccagcgcgtggaccataccagcttttccacttcttcttcgatggaagaggtgaccgcgctgttgccgatattggcgttaacttttaccaggaaattgcgaccaataatcatcggctcgctttccggatgattaatgttggccgggataatcgcacgtccggcagcaacttcatcacggacaaattccgcagtgatattttccggcagatgtgcgccaaagctcattcccggatgctggtggcgtaaaacctcgctacggatgcgctcgcggcccatattctcgcggatggcgatgaattccatttccggcgtgatgatgccctggcgggcgtagtgcagttgggtgacacggcgtcctgctttggcgcgttttggtgttagtacgccgctaaaacgcagttcgtcgaggccatcatctgccagccgcgctttagtgtaatcggaactgcgcacggtaagttcttcggtatcgccgcgcgcatcgatccacggctggcgtagttttgccagcccttgctgcacgttaatggcaatctgcggatcaccatacgggccggaggtgtcgtagaccggaatcgcttcgttttcttcgtactgcggctgttctttgctaccgccaattagcgtcgggctaagctggatctcacgcatcggcacgcgcacgccggggtgtgtgccagtgatataaatgcgtttactgttgggaaaggcggtgccttccagggtgtcgataaaatgttgggcccgggcgcgttgttcgcggcgggtcagttttgttgcagacatagctcattccaaaaagttaaggacgtggcttgtcagacgacggatgaagcaagagacgatcgccgcaggggcgatgcgatagcagattaactcttgttcccttcgcaggtattagcctgatcaggttccgcggatcccgaataaacggtctcagccagttaaggcactccgacaagaaattagccccgcaaatggggcattgaatgtaaattacgcgttaacagcgcagaactcaagcaggatgtttgacgcgggcggcgtcaagcaccagcagaatcagcttatcttccagcacaaagcgcgcttccagcgcctcgccgatgtcagataaaacctgttgaaactcaaggtaattatcatgatcgatggcggtttccagactggaatcgtagtaatccataatctgttgagtattggcttcgagttgcggccaaatcttcgcggcgcgcgcgagttgcccgttgccttccagcttatgaagaatgcgctcataaatactgaaatgtccggcagacaagtaatcgaccaggctctgacaaaaatcatcaagggctttttcgtttagcctcatgtagctttctttgccaggcttaatgccaaccagattgtagtaagccacgagcagatgcttacgtacatgtagccagcgatcaaccagtttgttacttcctctgacgcgctccgtcaggttatcgagctggttaagcatgattgactccgcaagtttgtattcaaaaactgctcagtgagaaatgtaaaaaccatgttaaacatgccagtgatgcaaaggtagtgcaagagctatggatcgtataattgaaaaattagatcacggctggtgggtcgtcagccatgaacaaaaattatggttgccgaagggagaattgccatatggcgaagcggcaaatttcgatcttgtgggtcagcgcgcactacaaatcggcgaatggcagggggaacctgtttggttagtacaacagcagcggcgtcacgatatggggagcgtacgtcaggtcattgatctcgatgttgggctgtttcaactggccggacgaggcgtacaactggcggagttttaccgaagtcataaatactgtggttactgcgggcatgaaatgtatccgagcaaaaccgaatgggcgatgctgtgcagccattgccgtgagcgttactacccgcaaatcgccccctgcattattgttgccatccgtcgcgatgatagcatcctcctcgcccagcatacccgccatcgtaacggtgtccatacagtacttgccggattcgtcgaagtgggcgaaaccctcgagcaggcagtcgcgcgggaagtgatggaagagagcggaattaaagttaaaaacttgcgttacgtgacttctcagccgtggccgtttcctcagtctttaatgaccgcgtttatggcggaatatgacagcggcgacatcgtgatcgacccgaaagaattgctcgaggcgaactggtatcgctatgacgatttgccgttactcccgccgcccggcaccgtagcgcgccgtctgatagaagatacggtggcgatgtgtcgggcagagtatgagtgatgatacactgaccgcctgacgcactaaggaacagccaaaatgaccgaacttaaaaacgatcgttatctgcgggcgctgctgcgccagcccgttgatgtcactccagtatggatgatgcgccaggcgggtcgctatctaccggaatataaagccacgcgcgcccaggcaggcgattttatgagcctgtgcaaaaacgccgagctggcgtgcgaagtgactttgcaaccgctgcgtcgctacccgctggatgcggcgatcctcttttccgatatcctcaccgtgccggacgcgatggggttagggctctattttgaagccggagaaggtccgcgttttaccagcccagtcacctgcaaagctgacgtcgataaactgccaattccggacccggaagatgaactgggttacgtgatgaacgcggtgcgtaccattcgtcgcgaactgaaaggcgaagtgccgctgattggtttttccggcagcccgtggacgctggcgacctacatggtggaaggcggcagcagcaaagccttcaccgtgatcaaaaaaatgatgtatgccgatccgcaggcgctgcacgctctgctcgataaactggcgaaaagcgtcactttgtatctgaatgcgcagattaaagccggtgctcaggcagtgatgattttcgacacctggggcggcgtgcttaccgggcgcgattatcaacagttcagcctctattacatgcataaaattgttgatggtttactgcgtgaaaacgacggtcgccgcgtaccggtcacgctgtttaccaaaggcggcggacagtggctggaagccatggcagaaaccggttgcgatgcgctgggcctcgactggacaacggacatcgccgatgcgcgccgccgtgtgggcaataaagtcgcgttgcagggtaatatggatccgagcatgctgtacgcgccgcctgcccgcattgaagaagaagtagcgactatacttgcaggtttcggtcacggcgaaggtcatgtctttaaccttggtcacggcattcatcaggatgtgccgccagaacatgctggcgtgttcgtggaggcagtgcatcgactgtctgaacagtatcaccgctaaggagtgattatggatctcgcgagtttacgcgctcaacaaatcgaactggcttcttctgtgatccgcgaggatcgactcgataaagatccaccggatctgatcgccggagccgatgtcgggtttgagcagggcggagaagtgacgcgagcggcgatggtgctgctgaaatatcccagccttgagctggtcgagtataaagttgcccgcatcgccaccaccatgccttacattccaggttttctttccttccgcgaatatcctgcgctgctggcagcgtgggagatgctgagccaaaagccggatttagtgtttgtcgatggtcatgggatcagccatcctcgccgtcttggcgtcgccagccattttggcttattggtggatgtgccgaccattggcgtggcgaaaaaacggctctgcggtaaattcgaaccgctctccagcgaaccgggcgcgctggccccactgatggataaaggcgagcagctggcctgggtctggcgcagcaaagcgcgctgtaacccgttgtttatcgctaccggccatcgggtcagcgtggacagcgcgctggcgtgggtacaacgctgcatgaaaggctatcgtctgccggagccaacgcgctgggcggacgcggtggccagcgaacgtccggcgttcgtgcgctatacagcaaatcagccctaattcaggtaaactgcggataatttccgtatttgagaactcaacatgttacaaaacccaattcatctgcgtctggagcgcctggaaagctggcagcatgtcactttcatggcttgcttatgcgaacgcatgtaccccaattacgccatgttctgccagcaaaccggttttggtgatgggcaaatttaccgtcgcattctcgatctcatctgggaaacgctgaccgttaaagacgcaaaagtaaatttcgacagccaactggagaaatttgaagaagcgattcctagtgccgacgatttcgatctgtacggcgtttatccggcaatcgatgcctgcgtggcgttaagtgaactggtccatagccgtttgagtggtgaaacgctcgaacacgcggtggaagtgagtaagacctccatcacgaccgttgcgatgctggaaatgactcaggctggtcgcgaaatgagcgatgaagagcttaaagaaaacccagctgtagagcaagaatgggacattcagtgggaaatattccgacttttagctgagtgcgaagaacgcgatatcgagctgataaaaggccttagggcagacctgcgtgaggcgggtgagagcaatattggtataatttttcagcaataagaccagaaaacgtgatttaacgcctgatttgtcgtacctggagtcttccctttcgcccccgtctggtctacatttggggggcgaaaaaaagtggctatcggtgcgtgtatgcaggagagtgctattctggcatttccgtcgcactcgatgcttagcaagcgataaacacattgtaaggataacttatgaacaagactcaactgattgatgtaattgcagagaaagcagaactgtccaaaacccaggctaaagctgctctggagtccactctggctgcaattactgagtctctgaaagaaggcgatgctgtacaactggttggtttcggtaccttcaaagtgaaccaccgcgctgagcgtactggccgcaacccgcagaccggtaaagaaatcaaaattgccgcagctaacgtaccggcatttgtttctggcaaggcactgaaagacgcagttaagtaagattgcgtggcagtgaacagttttaacgaaggggtggttagtccccttttgtctttctggcgtcgaagtttgatgctggctggcgctctgcttctcactgcctgtagtcataactctagtcttcctccctttaccgccagtggatttgctgaagaccagggcgcggtacgcatctggcgaaaagacagcggcgataatgtgcatctgcttgccgtgtttagcccgtggcgcagtggcgataccacgacgcgagagtatcgctggcagggcgataacctcacgctcatcaatatcaatgtttacagcaaaccgccggtgaatattcgcgcgcgttttgacgatcgcggtgatctgagctttatgcaacgtgaatccgatggggaaaagcagcagctttctaacgaccaaatcgatttataccgttatcgtgctgatcagatccgccagattagcgatgccttacgtcaggggagagtcgtgctgcgccaggggcgctggcatgcgatggaacagaccgtgaccacctgcgaagggcaaaccattaaacctgatttagatagccaggcgatagcgcatatcgagcgccgccagagccgctcttctgttgatgtcagcgtggcatggctggaagcgcccgaaggtagccaattactgttagtggcaaactctgatttctgtcgctggcaacccaacgagaaaacgttctgatttaccagtggcccatacccatatgaccgccaccaccgcagccgccgtagcccatgcccattccggctccgcgcggaatacccgcttcagccatcgcgatatctcgtttcacccgtaactcatctaagctctgacgcaaattctccatctctttggcgaccgcgttaattttgctgctatccggtgggttcgcggctaacagggcattgtattcataacgcttcgtcaccagttgctgttgcagtgcgctgctttgagcgtaaaagtcattatggattttctgccacgctgtctgttgttcgctggtcaaaggcgcggcattttgctgccacataccgtgtccgccgtgagcaaatgcagatgtgcttcccatcgccattgcactaagcgccatcattaccagggcaattttcgtgttccgtttcatggttaatcctccagtggttgtcttacttcgggtattgcatcttccgtgccaacgatgaaacgctgatatgacgggtaatctggcatgataaacgagtaaaaatgactcgcctgctgcgggtagcgagtcatttttactcattgaaacttaagcctttgtgttacagcgcagggtaagcgctgataaaagatggcatgatttctgctgtcagaaagggatgagcaggcaaagaagaagatgcgttttatgcaacgttctaaagactccttagctaaatggttaagcgcgatcctccccgtggtcattgttgggctggtgggattgtttgcggtaactgtgattcgtgattatgggcgggcaagcgaggcagaccgccaggcattactggaaaaaggtaatgtgcttatccgcgctctggagagcggaagccgcgtagggatggggatgcgaatgcaccatgtacagcaacaggcgcttctggaagagatggcgggacagccgggagtgttgtggttcgcagtcaccgatgcgcagggcatcattattcttcatagcgaccccgataaggtcgggcgtgcgctctatagcccggatgaaatgcagaaattaaagccagaggaaaactcccgctggcggctgcttgggaaaacggaaactacgcctgcacttgaggtctatcgtttgttccagccaatgagtgcgccctggcggcatggaatgcacaatatgccgcgctgtaacggcaaagctgtgccacaagtagatgcacaacaggctatttttatcgccgttgatgccagtgatctggttgcaacccagagtggggaaaagcgcaataccctgattatcctcttcgccctggcgacggtcttgctggcaagcgtattgagtttcttctggtatcgccgctatctgcgcagccgccagcttctacaagatgaaatgaagcgcaaagagaagctggtggcgctggggcatcttgcggcaggcgttgcccacgaaatccgtaacccactttccagcattaaaggactggcgaaatactttgccgagcgcgcgcctgcagggggagaagcgcatcaactggcgcaggtgatggcgaaagaggccgaccgtttaaaccgcgtggtaagcgagttgctggaactggttaagccaacgcatctggctttgcaggcggtggatctcaacacgctgattaaccacagtttacagctggtaagtcaggatgcaaacagccgggagatccagttacgctttaccgccaacgacacattaccggaaattcaggccgacccggacaggctgactcaggtcctgttgaatctctatctcaatgctattcaggcgattggtcagcatggcgtgattagcgtgacggccagcgaaagcggcgcgggcgtgaaaatcagcgttaccgacagcggtaagggaattgcggcagatcagcttgatgccatcttcactccgtacttcaccactaaagccgaaggcaccggattggggctggcggtcgtgcataatattgttgaacaacacggtggtacaattcaggtcgcaagccaggagggaaaaggcagtacgttcaccctctggcttccggtcaatattacgcgtaaggacccacaaggatgacgcacgataatatcgatattctggtggtggatgatgacattagccactgcactattttgcaggctttactgcgcggctggggctataacgtcgcgctggcgaacagcgggcgacaggcgttggagcaggtgcgggaacaggtttttgatcttgtgctttgcgatgtgcgaatggcggagatggacggcatcgccacgctgaaagagatcaaagcgttaaacccggcaattccggtgctgattatgactgcgtactccagcgtcgagacggcggtagaggcactgaaaactggggcgctggattatctcatcaagccgctggatttcgataacctacaggcgacgctggaaaaagcgctcgcgcatacgcacagtattgatgctgaaacacctgcggtgactgccagccagttcggtatggtcggtaaaagcccggcgatgcaacacctgctcagtgaaatcgccctcgtcgcgccaagcgaagccacggtactgatccacggcgattccggcaccggtaaagagctggtcgccagggcgattcacgccagtagcgcacgtagcgaaaaaccgctggtaacgctcaactgtgcggcactcaacgaatccttgctggaatctgaattgttcggtcacgaaaaaggggcgtttactggagccgataaacgccgggaagggcgctttgttgaggcggacggcggcacgctgtttctcgatgaaattggcgatatcagcccgatgatgcaggtgcgtctgctgcgtgcgattcaggagcgcgaagttcagcgtgtcggtagcaaccagattatcagcgttgatgtccggctgattgcggcgacccatcgcgatcttgccgcagaggtgaatgccgggcgttttcgccaggatctctactatcgcctgaatgtggtggcgattgaagtaccaagcctgcggcaacggcgggaagatatccctctgctggctggccattttctgcagcgctttgccgagcgtaatcgcaaggcggtaaaaggttttacgccccaggcgatggatctgttgattcattacgactggccgggaaatattcgtgagctggaaaacgcggtggaacgggcagtggtgctgctgaccggggaatatatttccgaacgcgagctgccgctggcgattgccagtacgccgatcccgctgggacaaagtcaggatattcagccgttggtggaagtggaaaaagaggtgattctggcggcgctggagaaaacgggcggcaacaaaaccgaagccgcccgtcagttagggatcacgcgcaaaacgctattggcaaaactgagccgttaattctgctcgcgttcgatagcgcgccagccgatatctttccggcagaagcagtcgtcccagtggatatcggtcattaaggcataggcgcgtttctgcgcttctgccacggtatgacccagcgcggtgacgcacagtacgcgcccgccgttggtcactacctgctcgtcatccgccagttttgtgcccgcgtggaacactttgccgcctgccacttcttccagcggcaggccgtggatcacgtcaccggtgcggtaatcacccggatatccacccgcagccatcaccacgccgagagaagcgcgttcatcccactcggacgttttctcgtccagtttgctttcacaggccgccaggcagagctcaaccagatcggacttcatgcgcagcataatcggctgggtttccggatcgccaaagcggcagttaaattcaataaccttcggattgccctgtttgtcgatcatcaggcccgcgtagagaaaaccggtgtaggtgttgccttccgccgccatgcctttcacggttggccagataatacgttccatggtgcgctgatgaacgtcatcggttactaccggcgcgggggagtaagcgcccatcccgccggtgtttggtccggtatctttatcgcctacgcgtttgtgatcctggctggtagccatcggcagcacatgctcgccgtccaccatcacgataaagctcgcttcttcgccatcgaggaactcttcgataacgatgcgatgacccgcgtcgccaaaagcgttgcccgccagcatatcgtgaacagccgcttccgcttcttccagcgtcatcgccacgataacgcctttcccggcagccagaccgtccgctttaatgacgattggcgcgcctttctcacgcagatacgccagcgcaggttctacctcggtgaagttctggtattccgccgtagggatcttatggcgggccaggaaatctttggtaaacgctttactgccttccagttgggccgcacctgcggttgggtcgaagattttcagcccggcggcgcggaaggtatcgaccacgcctttcaccagcggcgcttccgggccgacgatggtcagatcaatcttttcgttttgtgcgaaatccaacagcgccgggatatcggtcacgccaatagcaacgttttgcagcgcgggttccagtgcagtgcctgcattacccggagcaacaaaaacagtctcaaccagcgggctctgggccgctttccaggccagcgcgtgctcgcgcccgccgttaccaatcactaatactttcatctattgctccattaatggcggaagtggcgcatgtcggtgaagagcatcgcaataccgtgctcgtcggcggcggcaatcacttcgtcatcacggatagaaccgccaggctggattacgcaggtcacgcccgcagcggcggcggcatcaataccgtcgcggaacgggaagaacgcgtcagaagccatgctggaacctttcacttccaggccttcatcggccgctttaataccggcgatttttgcggagtacacgcggctcatctggcccgcgccaatgccgatagtcatattgtttttggcatagacgatagcgttggatttcacaaacttcgccaccttccagcagaacagcgcatcacgcagttcctgttcgctcggctgacgtttggtcaccacgcgcagttcttccgcaccgaccatccccaggtcacgatcctgaaccagcagaccgccgttcacgcgtttgaaatcgaggcccggaacacgctcgccccactgaccgcaggtcagaacgcgtacgttctgtttggcggcggtgattttcagggcttcttcgctggcggacggcgcaataatcacttcgacaaactgacgagaaatgatggcctgtgcggtttccgcatccagctcgcggttaaaggcaatgatgccgccgaatgcggaggttgggtcggttttgtacgcgcgatcgtaagcatcaagaatggaattgccgatagccacgccgcaagggttggcgtgcttcacaatcacacatgccggctcggcgaactctttcacgcactccagcgccgcatcggtatcggcgatgttgttataagagagggctttaccctgaacctgggttgcggtagcaacggaggcttctttcacattctcttctatatagaaggcagcctgctggtggctgttctcgccgtaacgcatatccagcttcttaatgaagttcaggttcagcgtgcgtgggaagcgaccggcggcttctttgctttcaccgtggtaagccggaaccatgctgccgaagtagttggcaatcatgctgtcgtaggcggcagtgtgttcgaaggctttgatggcgaggtcgaaacgggttgcaagcgtcaggcttccttcgttgtcatccatctctttaataatggcgtcatagtcgctgctcttcaccacgattgcgacatctttatggttcttggcggcggagcgcaccatcgttgggccgccgatatcgatgttctcaaccgcatcttccaggctgcaaccttcacgggccacggtctgggcgaacggatacaggttaacaaccaccatatcgataggctggatctgatgttcttccataatggcatcgtcctggccgcgacggcccagaatgccaccatgtactttcggatgcagggtcttcacgcgtccatccatcatctccgggaaaccggtgtaatcggaaacttcggttaccggcagacctttttctgctaacagacgggcagtgccccctgtagacagcagctccacaccgcgtgcggaaagtgcctgggcgaattcgacgataccggctttgtcagaaacactgagcagagcgcggcggactggacgacgttgttgcatggtaaatcccctggatttgactattacagagagcgttagctgaatttttcgcgaaaaactcagctaacgcccctaacggggcatccttatttttcgcccgcattgtaacgaaaacgtttgcgcaacgctcgcgaatttttctctttcaatggtgatcacaattttgactgtggttaccgtgggcaaaatacagaaattacattgatgattgtggataactctgtgcgtaaaaaggtataaagcgggcttttgctggggaatgcagcagtcagtcatttttctgcaatttttctattgcggcctgcggagaactccctataatgcgcctccatcgacacggcggatgtgaatcacttcacacaaacagccggttcggttgaagagaaaaatcctgaaattcagggttgactctgaaagaggaaagcgtaatatacgccacctcgcgacagtgcgctaaagcgcgtcgcaactgctctttaacaatttatcagacaatctgtgtgggcactcgaagatacggattcttaacgtcgcaagacgaaaaatgaataccaagtctcaagagtgaacacgtaattcattacgaagtttaattctttgagcatcaaacttttaaattgaagagtttgatcatggctcagattgaacgctggcggcaggcctaacacatgcaagtcgaacggtaacaggaagaagcttgcttctttgctgacgagtggcggacgggtgagtaatgtctgggaaactgcctgatggagggggataactactggaaacggtagctaataccgcataacgtcgcaagaccaaagagggggaccttcgggcctcttgccatcggatgtgcccagatgggattagctagtaggtggggtaacggctcacctaggcgacgatccctagctggtctgagaggatgaccagccacactggaactgagacacggtccagactcctacgggaggcagcagtggggaatattgcacaatgggcgcaagcctgatgcagccatgccgcgtgtatgaagaaggccttcgggttgtaaagtactttcagcggggaggaagggagtaaagttaatacctttgctcattgacgttacccgcagaagaagcaccggctaactccgtgccagcagccgcggtaatacggagggtgcaagcgttaatcggaattactgggcgtaaagcgcacgcaggcggtttgttaagtcagatgtgaaatccccgggctcaacctgggaactgcatctgatactggcaagcttgagtctcgtagaggggggtagaattccaggtgtagcggtgaaatgcgtagagatctggaggaataccggtggcgaaggcggccccctggacgaagactgacgctcaggtgcgaaagcgtggggagcaaacaggattagataccctggtagtccacgccgtaaacgatgtcgacttggaggttgtgcccttgaggcgtggcttccggagctaacgcgttaagtcgaccgcctggggagtacggccgcaaggttaaaactcaaatgaattgacgggggcccgcacaagcggtggagcatgtggtttaattcgatgcaacgcgaagaaccttacctggtcttgacatccacggaagttttcagagatgagaatgtgccttcgggaaccgtgagacaggtgctgcatggctgtcgtcagctcgtgttgtgaaatgttgggttaagtcccgcaacgagcgcaacccttatcctttgttgccagcggtccggccgggaactcaaaggagactgccagtgataaactggaggaaggtggggatgacgtcaagtcatcatggcccttacgaccagggctacacacgtgctacaatggcgcatacaaagagaagcgacctcgcgagagcaagcggacctcataaagtgcgtcgtagtccggattggagtctgcaactcgactccatgaagtcggaatcgctagtaatcgtggatcagaatgccacggtgaatacgttcccgggccttgtacacaccgcccgtcacaccatgggagtgggttgcaaaagaagtaggtagcttaaccttcgggagggcgcttaccactttgtgattcatgactggggtgaagtcgtaacaaggtaaccgtaggggaacctgcggttggatcacctccttaccttaaagaagcgttctttgcagtgctcacacagattgtctgatagaaagtgaaaagcaaggcgtcttgcgaagcagactgatacgtccccttcgtctagaggcccaggacaccgccctttcacggcggtaacaggggttcgaatcccctaggggacgccacttgctggtttgtgagtgaaagtcacctgccttaatatctcaaaactcatcttcgggtgatgtttgagatatttgctctttaaaaatctggatcaagctgaaaattgaaacactgaacaacgaaagttgttcgtgagtctctcaaattttcgcaacacgatgatgaatcgtaagaaacatcttcgggttgtgaggttaagcgactaagcgtacacggtggatgccctggcagtcagaggcgatgaaggacgtgctaatctgcgataagcgtcggtaaggtgatatgaaccgttataaccggcgatttccgaatggggaaacccagtgtgtttcgacacactatcattaactgaatccataggttaatgaggcgaaccgggggaactgaaacatctaagtaccccgaggaaaagaaatcaaccgagattcccccagtagcggcgagcgaacggggagcagcccagagcctgaatcagtgtgtgtgttagtggaagcgtctggaaaggcgcgcgatacagggtgacagccccgtacacaaaaatgcacatgctgtgagctcgatgagtagggcgggacacgtggtatcctgtctgaatatggggggaccatcctccaaggctaaatactcctgactgaccgatagtgaaccagtaccgtgagggaaaggcgaaaagaaccccggcgaggggagtgaaaaagaacctgaaaccgtgtacgtacaagcagtgggagcacgcttaggcgtgtgactgcgtaccttttgtataatgggtcagcgacttatattctgtagcaaggttaaccgaataggggagccgaagggaaaccgagtcttaactgggcgttaagttgcagggtatagacccgaaacccggtgatctagccatgggcaggttgaaggttgggtaacactaactggaggaccgaaccgactaatgttgaaaaattagcggatgacttgtggctgggggtgaaaggccaatcaaaccgggagatagctggttctccccgaaagctatttaggtagcgcctcgtgaattcatctccgggggtagagcactgtttcggcaagggggtcatcccgacttaccaacccgatgcaaactgcgaataccggagaatgttatcacgggagacacacggcgggtgctaacgtccgtcgtgaagagggaaacaacccagaccgccagctaaggtcccaaagtcatggttaagtgggaaacgatgtgggaaggcccagacagccaggatgttggcttagaagcagccatcatttaaagaaagcgtaatagctcactggtcgagtcggcctgcgcggaagatgtaacggggctaaaccatgcaccgaagctgcggcagcgacgcttatgcgttgttgggtaggggagcgttctgtaagcctgcgaaggtgtgctgtgaggcatgctggaggtatcagaagtgcgaatgctgacataagtaacgataaagcgggtgaaaagcccgctcgccggaagaccaagggttcctgtccaacgttaatcggggcagggtgagtcgacccctaaggcgaggccgaaaggcgtagtcgatgggaaacaggttaatattcctgtacttggtgttactgcgaaggggggacggagaaggctatgttggccgggcgacggttgtcccggtttaagcgtgtaggctggttttccaggcaaatccggaaaatcaaggctgaggcgtgatgacgaggcactacggtgctgaagcaacaaatgccctgcttccaggaaaagcctctaagcatcaggtaacatcaaatcgtaccccaaaccgacacaggtggtcaggtagagaataccaaggcgcttgagagaactcgggtgaaggaactaggcaaaatggtgccgtaacttcgggagaaggcacgctgatatgtaggtgaggtccctcgcggatggagctgaaatcagtcgaagataccagctggctgcaactgtttattaaaaacacagcactgtgcaaacacgaaagtggacgtatacggtgtgacgcctgcccggtgccggaaggttaattgatggggttagcgcaagcgaagctcttgatcgaagccccggtaaacggcggccgtaactataacggtcctaaggtagcgaaattccttgtcgggtaagttccgacctgcacgaatggcgtaatgatggccaggctgtctccacccgagactcagtgaaattgaactcgctgtgaagatgcagtgtacccgcggcaagacggaaagaccccgtgaacctttactatagcttgacactgaacattgagccttgatgtgtaggataggtgggaggctttgaagtgtggacgccagtctgcatggagccgaccttgaaataccaccctttaatgtttgatgttctaacgttgacccgtaatccgggttgcggacagtgtctggtgggtagtttgactggggcggtctcctcctaaagagtaacggaggagcacgaaggttggctaatcctggtcggacatcaggaggttagtgcaatggcataagccagcttgactgcgagcgtgacggcgcgagcaggtgcgaaagcaggtcatagtgatccggtggttctgaatggaagggccatcgctcaacggataaaaggtactccggggataacaggctgataccgcccaagagttcatatcgacggcggtgtttggcacctcgatgtcggctcatcacatcctggggctgaagtaggtcccaagggtatggctgttcgccatttaaagtggtacgcgagctgggtttagaacgtcgtgagacagttcggtccctatctgccgtgggcgctggagaactgaggggggctgctcctagtacgagaggaccggagtggacgcatcactggtgttcgggttgtcatgccaatggcactgcccggtagctaaatgcggaagagataagtgctgaaagcatctaagcacgaaacttgccccgagatgagttctccctgactccttgagagtcctgaaggaacgttgaagacgacgacgttgataggccgggtgtgtaagcgcagcgatgcgttgagctaaccggtactaatgaaccgtgaggcttaaccttacaacgccgaaggtgttttggcggattgagagaagattttcagcctgatacagattaaatcagaacgcagaagcggtctgataaaacagaatttgcctggcggcagtagcgcggtggtcccacctgaccccatgccgaactcagaagtgaaacgccgtagcgccgatggtagtgtggggtctccccatgcgagagtagggaactgccaggcatcaaattagaaaaaccccggtccataaggccggggttttttgcatatcaattatttgcatgatgaagggaatctcatgagtgttctgtatatccaaattcgtcgtaatcaaattactgttcgcgatcttgaaagcaaacgtgaagtgagtggagacgctgccttcagtaaccagcgcctgttaatcgccaatttctttgttgcagaaaaagttctgcaagatcttgttctgcaactccacccacgtagtacctggcattcttttttgccagcaaaacgtatggatattgttgtgagcgcactggaaatgaatgagggcggtttgagtcaggttgaggaacgcattctccatgaagtggtcgctggggcaacgttaatgaaatatcgccagttccacatccatgcgcaaagtgcggtactcagtgatagtgcggtcatggcaatgcttaagcagaaataatcgtgtcaccattggtgggtactaaacctgaagttcagcccaccgggatgagaaaaaatcgcttacgcccccacatacgccagattcagcaacggatacggtttccccaaatcgtccacctcagagcgtcccgtaaccttaaaacccaccttcttatagaacccaaccgcctgctcattttgctcattaacgttggttgtcagttccggtgccatgctgagcgcatgctccaccagcacccgacctacgccgcagccgcgcacatcaggatcgataaacagcgcatccatatgctgcccacttagcaacataaatccaaccggctgatcccgctcattaaccgcgacccacaacggcgcttccggcaggaaggaacgaactaggtcctccagctcggtccgatactctgcacttagaaaatcgtgagtggcatcgacagaacgacaccaaatcgcaacgagttcctccccttcctcatgccgactgcggcgaatactaataaccattttctctccttttagtcattcttatattctaacgtagtcttttccttgaaactttctcaccttcaacatgcaggctcgacattggcaaattttctggttatcttcagctatctggatgtctaaacgtataagcgtatgtagtgaggtaatcaggttatgccgattcgtgtgccggacgagctacccgccgtcaatttcttgcgtgaagaaaacgtctttgtgatgacaacttctcgtgcgtctggtcaggaaattcgtccacttaaggttctgatccttaacctgatgccgaagaagattgaaactgaaaatcagtttctgcgcctgcttagtaacagtcctttgcaggtcgatattcagctgttgcgcatcgattcccgtgaaagccgcaacacgcccgcagagcatctgaacaacttctactgtaactttgaagatattcaggatcagaactttgacggtttgattgtaactggtgcgccgctgggcctggtggagtttaatgatgtcgcttactggccgcagatcaaacaggtgctggagtggagcaaagatcacgtcaccagcacgctgtttgtctgctgggcggtacaggccgcgctcaatatcctctacggcattcctaagcaaactcgcaccgaaaaactctctggcgtttacgagcatcatattctccatcctcatgcgcttctgacgcgtggctttgatgatagtttcctggcaccgcatagccgctatgctgactttccggcagcgttgattcgtgattacaccgatctggaaattctggcagagacggaagaaggggatgcatatctgtttgccagtaaagataagcgcattgcctttatgacgggccatcccgaatatgatgcgcaaacgctggcgcaggaatttttccgcgatgtggaagccggactagacccggatgtaccgtataactatttcccgcacaatgatccgcaaaatacaccgcgagcgagctggcgtagtcacggtaatttactgtttaccaactggctcaactattacgtctaccagatcacgccatacgatctacggcacatgaatccaacgctggattaatcttctgtgatagtcgatcgttaagcgattcagcaccttacctcaggcaccttcgggtgccttttttatttccgaaacgtacctcagcaggtgaataaattttattcatattgttatcaacaagttatcaagtatttttaattaaaatggaaattgtttttgattttgcattttaaatgagtagtcttagttgtgctgaacgaaaagagcacaacgatccttcgttcacagtggggaagttttcggatccatgacgaggagctgcacgatgactgaacaggcaacaacaaccgatgaactggctttcacaaggccgtatggcgagcaggagaagcaaattcttactgccgaagcggtagaatttctgactgagctggtgacgcattttacgccacaacgcaataaacttctggcagcgcgcattcagcagcagcaagatattgataacggaacgttgcctgattttattagcgaaacagcttccattcgcgatgctgattggaaaattcgcgggattcctgcggacttagaagaccgccgcgtagagataactggcccggtagagcgcaagatggtgatcaacgcgctcaacgccaatgtgaaagtctttatggccgatttcgaagatagtctggcaccagactggaacaaagtgatcgacgggcaaattaacctgcgtgatgcggttaacggcaccatcagttacaccaatgaagcaggcaaaatttaccagctcaagcccaatccagcggttttgatttgtcgggtacgcggtctgcacttgccggaaaaacatgtcacctggcgtggtgaggcaatccccggcagcctgtttgattttgcgctctatttcttccacaactatcaggcactgttggcaaagggcagtggtccctatttctatctgccgaaaacccagtcctggcaggaagcggcctggtggagcgaagtcttcagctatgcagaagatcgctttaatctgccgcgcggcaccatcaaggcgacgttgctgattgaaacgctgcccgccgtgttccagatggatgaaatccttcacgcgctgcgtgaccatattgttggtctgaactgcggtcgttgggattacatcttcagctatatcaaaacgttgaaaaactatcccgatcgcgtcctgccagacagacaggcagtgacgatggataaaccattcctgaatgcttacagtcgcctgttgattaaaacctgccataaacgcggtgcttttgcgatgggcggcatggcggcgtttattccgagcaaagatgaagagcacaataaccaggtgctcaacaaagtaaaagcggataaaagcctggaagccaataacggtcacgatggcacatggatcgctcacccaggccttgcggacacggcaatggcggtattcaacgacattctcggctcccgtaaaaatcagcttgaagtgatgcgcgaacaagacgcgccgattactgccgatcagctgctggcaccttgtgatggtgaacgcaccgaagaaggtatgcgcgccaacattcgcgtggctgtgcagtacatcgaagcgtggatctctggcaacggctgtgtgccgatttatggcctgatggaagatgcggcgacggctgaaatttcccgtaccagcatctggcagtggatccatcatcaaaaaacgttgagcaatggcaaaccggtgaccaaagccttgttccgccagatgctgggcgaagagatgaaagtcattgccagcgaactgggcgaagaacgtttctcccaggggcgttttgacgatgccgcacgcttgatggaacagatcaccacttccgatgagttaattgatttcctgaccctgccaggctaccgcctgttagcgtaaaccaccacataactatggagcatctgcacatgaaaacccgtacacaacaaattgaagaattacagaaagagtggactcaaccgcgttgggaaggcattactcgcccatacagtgcggaagatgtggtgaaattacgcggtagtgtcaatcctgaatgcacgctggcgcaactgggcgcagcgaaaatgtggcgtctgctgcacggtgagagcaaaaaaggctacatcaacagcctcggcgcactgactggcggtcaggcgctgcaacaggcgaaagcgggtattgaagcagtctatctgagcggatggcaggtagcggcggacgctaacctggcggccagcatgtatccggatcagagcctctatccggcaaacagcgtgccagctgtggtggagcggatcaacaacaccttccgtcgtgccgatcagatccaatggtccgcgggcattgagccgggcgatccgcgctatgtcgattacttcctgccgatcgttgccgatgcggaagccggttttggcggtgtcctgaatgcctttgaactgatgaaagcgatgattgaagccggtgcagcggcagttcacttcgaagatcagctggcgagtgtgaagaaatgcggtcacatgggcggcaaagttttagtgccaactcaggaagctattcagaaactggtcgcggcgcgtctggcagctgacgtgacgggcgttccaaccctgctggttgcccgtaccgatgctgatgcggcggatctgatcacctccgattgcgacccgtatgacagcgaatttattaccggcgagcgtaccagtgaaggcttcttccgtactcatgcgggcattgagcaagcgatcagccgtggcctggcgtatgcgccatatgctgacctggtctggtgtgaaacctccacgccggatctggaactggcgcgtcgctttgcacaagctatccacgcgaaatatccgggcaaactgctggcttataactgcagcccgagcttcaactggcagaaaaacctcgacgacaaaactattgccagcttccagcagcagctgagcgatatgggctacaagttccagttcatcaccctggcaggtatccacagcatgtggttcaacatgtttgacctggcaaacgcctatgcccagggcgagggtatgaagcactacgttgagaaagtgcagcagccggaatttgccgccgcgaaagatggctataccttcgtatctcaccagcaggaagtgggtacaggttacttcgataaagtgacgactattattcagggcggcacgtctagtgtcaccgcgctgaccggctccactgaagaaagccagttctaagcaacaacaaccgttgctgactgtaggccggataaggcgttcacgccgcatccggcaatcggtgcacgatgcctgatgcgacgcttgcgcgtcttatcatgcctacagccgttgccgaacgtaggctggataaggcgtttacgccgcatccggcaattctctgctcctgatgagggcgctaaatgccgcgtggcctggaattattgattgctcaaaccattttgcaaggcttcgatgctcagtatggtcgattcctcgaagtgacctccggtgcgcagcagcgtttcgaacaggccgactggcatgctgtccagcaggcgatgaaaaaccgtatccatctttacgatcatcacgttggtctggtcgtggagcaactgcgctgcattactaacgaccaaagtacggacgcggcatttttactacgtgttaaagagcattacacccggctgttgccggattacccgcgcttcgagattgcggagagcttttttaactccgtgtactgtcggttatttgaccaccgcagccttactcccgagcggctttttatctttagctctcagccagagcgccgctttcgtaccattccccgcccgctggcgaaagactttcaccccgatcacggctgggaatctctactgatgcgcgttatcagcgacctaccgctgcgcctgcgctggcagaataaaagccgtgacatccattacattattcgccatctgacggaaacgctggggacagacaacctcgcggaaagtcatttacaggtggcgaacgaactgttttaccgcaataaagccgcctggctggtaggcaaactgatcacaccttccggcacattgccatttttgctgccgatccaccagacggacgacggcgagttatttattgatacctgcctgacgacgaccgccgaagcgagcattgtttttggctttgcgcgttcttattttatggtttatgcgccgctgcccgcagcgctggtcgagtggctacgggaaattctgccaggtaaaaccaccgctgaattgtatatggctatcggctgccagaagcacgccaaaaccgaaagctaccgcgaatatctcgtttatctacagggctgtaatgagcagttcattgaagcgccgggtattcgtggaatggtgatgttggtgtttacgctgccgggctttgatcgggtattcaaagtcatcaaagacaggttcgcgccgcagaaagagatgtctgccgctcacgttcgtgcctgctatcaactggtgaaagagcacgatcgcgtgggccgaatggcggacacccaggagtttgaaaactttgtgctggagaagcggcatatttccccggcattaatggaattactgcttcaggaagcagcggaaaaaatcaccgatctcggcgaacaaattgtgattcgccatctttatattgagcggcggatggtgccgctcaatatctggctggaacaagtggaaggtcagcagttgcgcgacgccattgaagaatacggtaacgctattcgccagcttgccgctgctaacattttccctggcgacatgctgtttaaaaacttcggtgtcacccgtcacgggcgtgtggttttttatgattacgatgaaatttgctacatgacggaagtgaatttccgcgacatcccgccgccgcgctatccggaagacgaacttgccagcgaaccgtggtacagcgtcagcccgggcgatgttttcccggaagagtttcgccactggctatgcgccgacccgcgtattggtccgctgtttgaagagatgcacgccgacctgttccgcgctgattactggcgcgcactacaaaaccgcatacgtgaagggcatgtggaagatgtttatgcgtatcggcgcaggcaaagatttagcgtacggtatggggagatgcttttttgagtaaagcttccatataatttttctccgcaatgtatcgagggttatccgtaaagccaaagctttcagccatcttatttaatgtattaaggattaattcagcaataacccggtgaccaaattcaaaagccaactcaaaggcagagtatttttgtggggctttgtgttgccaaaaatccataatatcttcagcggtaaatccaaacaggcgtgcatggtcagataaagcaagataaaccgtctctacaacattttgttgtttatgctgtatcgcactaaacaaaccgggatattcattagaattatttgccaggaggaggggcttcatattttttttatcgaatttaaacgtattaaacagagtgggtaatgcgttaaaaatagtattaataacgttcatgtgtccgcgctgcatggccataaacaaacccgtgtcgcgcgcaagacttttagcggtcagaagatctacaatatcggaagcactaatgttaatttcctgggctaggctgggcaatgcttcaagaataactttcacgatatcgctatgtccattttgcatcgccagatatagtcctgggcaaccataaaaatcctttgccttcaggagatcgagtacctgttctttagtcaaatgacatgtgcgaattaacaaaggtaacgcgttcaaaacaattttcagcatgtcggcatcaccattcgccataacatggtataaaacatggctggacgttctatttttggcactcaggaatttatacacttgttcgttatctaaatgatgtgttgcggccagtttaggtaaggcgttcagaatgctggttacaacatttttatccttacgacttatcgctaaaaataatccagaaaaaccatttttatcttttgcctccagaatatgcatgagattttttttgctgagtaatccttcatatcctgtttcactcaaactattgaaaatagtctcaacgatatccgcattaccataatttatagccaaatataaacctggcaggttaatactattataggcagtcaacatttctgttctatgtagttctggcattttctggagttgaatcatcagttgcgtaagttggtgattctgaccaattgccattagcaaattcatcgttgcaggacttaatggaggggttatttcatccacagatccttttaacatcaatagctgttctttcggaagtgctggaattattgcaacagattgattaataacatgatcattactccatttcaggaggctataatctacattcataaaatccatcagagaatagtgtttaatattctctttgctttcgctcataattcttattttatcgttagttacattaggatcataaacgctaaccacgtaatgggtacatccttcagttgtgttctttattcttagccggaccgtcaaagcatggttatccaccagtaatatggctgccataacactgatgccattactttccatcttgtcaaaatatgctttcataactagcccgaaatcaccgcaggcagcaacgcaacgcccctcaggacggctggaaaccaacgccaaagtctggtttttgcattttttgttgaagtgcgtgagaaatttttcagcactagagtaatcatcttgatggggtttgtaatcaacattctgataaatatcattaatatattgtgcagcaatgtgtcggcatactatacggttttggggtcgccccggaaaataacattgaccattaagtttaattcttgggaattctttttcttttctatcactttttaggtttaattcttgtttatcaagagtgtcactgcgttgaggtaaaatttccattaggtatttttcaaatattggggcaatggtttgagtaagtgtcgtgttttcgtttttattaattatcgtaatttctttcttatcagcttgtaagacggacgtggaaaatttaatgacaaaatccttgttgctaaagatatgacgaccattttgtctacagttctcactgaagctttttaatagaggcgtcgccagctccttgccagaaaatttatcctcgagttctttataaaacaattcactcagggtttggtgttcatttgtctgggctgtattattaatatttgcagagaaagaactacgaggaatacgagtaatcatttaaatatctcattgtttattgatgtcttgaattttaactatcagaacagtgaaaaaatttaatatgattacaactaaagaaatatcataaatcgctcaatctcataatgcagccgtaaaagtttcggtggaatgagatcttgcgattttgttaataattaagtggtttgatgtttaaaaataatgctgagttaataaaagtgtgtgaagtgtatgacattaagttattttggcgtcaatgcgattaacagacacccttattctattgccactcaggtatgatgggcagaatattgcctctgcccgccagaaaaagtcagcgcattccaccgtacgccagcgtcacttccttcgccgctttaatcaccatcgcgccaaactcggtcacgcggtcatcggtaatacgactaatcggtccggaaatagaaattgcggcaaacggttcacggtgctcatcgaaaatacacgctgcaaggcaacgtagccccagtgcatgttcctcatcgtcaaaactataaccccgtttgcgcgtttgggcgagatcttcttttaaatgcacaggagacaccagcgttgcgtgggtataggcatgtaaccctttgcggtgcagcagcttcgtcacctgttcttcgctcagttgggctaaaaaggctttacccgcaccggaagcgtgcatcggcaatttaccgccgataggcgcggacattcgcatcagatgcgtacactgtacctggtcgataataatcgcttcgtgatcgctttgatcaagcaccgccatattgaccgtttcgccagactcttccattagattgcgcaggatagggtgaacaatcgctaacaaattacggctctggagaaagctgctgccgaccataaaggcatgtgcgccgattgcccaatgtcccagttcgccaacctgacgcacgaaaccctgctgttgcatcgtggttagcaggcggtgggtcgtggaattgggtaacccggcttgttgcgccagttccgtgagtgccacactgccattggattcggcaatccactccagtaatttcaggccacgcgttaaagactgaacctgtccagtcgctggtgcggtggcaacggcgggttttctgccgcgtttcgcgggaatgggtgcgaccatgacagtctcttttttctgtatcgtggaaatcattttcatttttattgttagctaatgcaatagttactgaactgatccgatgagttaatgttgaacaaatctcatgttgcgtggtggtcgcttttaccacagatgcgtttatgccagtatggtttgttgaatttttattaaatctgggttgagcgtgtcgggagcaagtgtgagcagcaaagtggaacaactgcgtgcgcagttaaatgaacgtattctggtgctggacggcggtatgggcaccatgatccagagttatcgactgaacgaagccgattttcgtggtgaacgctttgccgactggccatgcgacctcaaaggcaacaacgacctgctggtactcagtaaaccggaagtgatcgccgctatccacaacgcctactttgaagcgggcgcggatatcatcgaaaccaacaccttcaactccacgaccattgcgatggcggattaccagatggaatccctgagcgcggaaatcaactttgcggcggcgaaactggcgcgagcttgtgctgacgagtggaccgcgcgcacgccagagaaaccgcgctacgttgccggtgttctcggcccgaccaaccgcacggcgtctatttctccggacgtcaacgatccggcatttcgtaatatcacttttgacgggctggtggcggcttatcgagagtccaccaaagcgctggtggaaggtggcgcggatctgatcctgattgaaaccgttttcgacacccttaacgccaaagcggcggtatttgcggtgaaaacggagtttgaagcgctgggcgttgagctgccgattatgatctccggcaccatcaccgacgcctccgggcgcacgctctccgggcagaccaccgaagcattttacaacagtttgcgccacgccgaagctctgacctttggcctgaactgtgcgctggggcccgatgaactgcgccagtacgtgcaggagctgagtcggattgcggaatgctacgtcaccgcgcacccgaacgccgggctacccaacgcctttggtgagtacgatctcgacgccgacacgatggcaaaacagatacgtgaatgggcgcaagcgggttttctcaatatcgtcggcggctgctgtggcaccacgccacaacatattgcagcgatgagtcgtgcagtagaaggattagcgccgcgcaaactgccggaaattcccgtagcctgccgtttgtccggcctggagccgctgaacattggcgaagatagcctgtttgtgaacgtgggtgaacgcaccaacgtcaccggttccgctaagttcaagcgcctgatcaaagaagagaaatacagcgaggcgctggatgtcgcgcgtcaacaggtggaaaacggcgcgcagattatcgatatcaacatggatgaagggatgctcgatgccgaagcggcgatggtgcgttttctcaatctgattgccggtgaaccggatatcgctcgcgtgccgattatgatcgactccagtaaatgggacgtcattgaaaaaggtctgaagtgtatccagggcaaaggcattgttaactctatcagcatgaaagagggcgtcgatgcctttatccatcacgcgaaattgttgcgtcgctacggtgcggcagtggtggtaatggcctttgacgaacagggacaggccgatactcgcgcacggaaaatcgagatttgccgtcgggcgtacaaaatcctcaccgaagaggttggcttcccgccagaagatatcatcttcgacccaaacatcttcgcggtcgcaactggcattgaagagcacaacaactacgcgcaggactttatcggcgcgtgtgaagacatcaaacgcgaactgccgcacgcgctgatttccggcggcgtatctaacgtttctttcagcttccgtggcaacgatccggtgcgcgaagccattcacgcagtgttcctctactacgctattcgcaatggcatggatatggggatcgtcaacgccgggcaactggcgatttacgacgacctacccgctgaactgcgcgacgcggtggaagatgtgattcttaatcgtcgcgacgatggcaccgagcgtttactggagcttgccgagaaatatcgcggcagcaaaaccgacgacaccgccaacgcccagcaggcggagtggcgcagctgggaagtgaataaacgtctggaatacagcctggtcaaaggcattaccgagtttatcgagcaggataccgaagaagcccgccagcaggctacgcgcccgattgaagtgattgaaggcccgttgatggacggcatgaatgtggtcggcgacctgtttggcgaagggaaaatgttcctgccacaggtggtcaaaagcgcgcgcgtcatgaaacaggcggtggcctacctcgaaccgtttattgaagccagcaaagagcagggcaaaaccaacggcaagatggtgatcgccaccgtgaagggcgacgtccacgacatcggtaaaaatatcgttggtgtggtgctgcaatgtaacaactacgaaattgtcgatctcggcgttatggtgcctgcggaaaaaattctccgtaccgctaaagaagtgaatgctgatctgattggccttagcgggcttatcacgccgagcctggacgagatggttaacgtggcgaaagagatggagcgtcagggcttcactattccgttactgattggcggcgcgacgaccagtaaagcgcacacggcggtgaaaatcgagcagaactacagcggcccgacggtgtatgtgcagaatgccagccgtaccgttggtgtggtggcggcgctgctttccgatacccagcgcgatgattttgtcgctcgtacccgcaaggagtacgaaaccgtacgtattcagcacgggcgcaagaaaccgcgcacaccaccggtcacgctggaagcggcgcgcgataacgatttcgcttttgactggcaggcttacacgccgccggtggcgcaccgtctcggcgtgcaggaagtcgaagccagcatcgaaacgctgcgtaattacatcgactggacaccgttctttatgacctggagcctggccgggaagtatccgcgcattctggaagatgaagtggtgggcgttgaggcgcagcggctgtttaaagacgccaacgacatgctggataaattaagcgccgagaaaacgctgaatccgcgtggcgtggtgggcctgttcccggcaaaccgtgtgggcgatgacattgaaatctaccgtgacgaaacgcgtacccatgtgatcaacgtcagccaccatctgcgtcaacagaccgaaaaaacaggcttcgctaactactgtctcgctgacttcgttgcgccgaagctttctggtaaagcagattacatcggcgcatttgccgtgactggcgggctggaagaggacgcactggctgatgcctttgaagcgcagcacgatgattacaacaaaatcatggtgaaagcgcttgccgaccgtttagccgaagcctttgcggagtatctccatgagcgtgtgcgtaaagtctactggggctatgcgccgaacgagaacctcagcaacgaagagctgatccgcgaaaactaccagggcatccgtccggcaccgggctatccggcctgcccggaacatacggaaaaagccaccatctgggagctgctggaagtggaaaaacacactggcatgaaactcacagaatctttcgccatgtggcccggtgcaagcgttagcggttggtacttcagccacccggacagcaagtactacgctgtagcacaaattcagcgcgatcaggttgaagattatgcccgccgtaaaggtatgagcgttaccgaagttgagcgctggctggcaccgaatctggggtatgacgcggactgattcacaaatctgtcacttttccttacaacaaacagggcgctcaatgagtgccctgtctctttattaatatgaaacacttatactggaaacaggctggaataatcttagccggaaaaacgaatgtcaaaaggcacagtaaagatgccagtcagcgtgtttccggtcctttggtcattcaattgcttcaggaacatataacgataaggagaacctgaactcgtgttaacgctgcttcacctgctttctgccgtcgccctgctggtctgggggactcatattgttcgaaccggcgtaatgcgcgtcttcggcgcgcgtttgcgtactgtccttagccggagcgtcgaaaaaaagccgctcgccttttgcgcggggatcggcgttaccgcactggtacagagcagtaatgccaccaccatgctggtgaccagctttgtcgctcaggatctggtagccctcgcaccggctctggtcattgtgctgggtgcagatgtcgggacggcgctaatggcgcgtattctcaccttcgacttatcctggctgagtccgttacttatttttatcggcgtgatttttttcctcggacgcaaacagagtcgcgccgggcaactgggccgcgtcggtattggtcttgggctgattttgctagcgctggagttgattgtgcaggccgtaacgccgatcacccaggcaaacggcgttcaggtgatctttgccagcctgaccggcgatattctgctggatgcgctgattggcgcgatgttcgccattatcagctactccagccttgctgctgtactgctgaccgcgactctgaccgccgcaggcattatctccttccccgtggcgctctgtctggtgattggtgctaacctcggttccggtctgctggcaatgctcaacaacagtgccgccaatgccgcagcccgccgtgtcgcgctgggtagtctgctgtttaagctggtgggtagcctgattatcctgccgtttgtccatttgctggcagagacaatggggaagttgagtttgccaaaagcggaactggtgatctatttccacgtcttctacaaccttgtacgttgcctggtcatgctgccatttgttgacccgatggcacggttttgcaaaacgattattcgcgatgaaccggaactggatacccagctacggcctaaacatctggatgtcagcgcgctggatacgcccacgcttgctctggcgaacgccgcgcgcgaaaccctgcgcattggcgacgccatggaacagatgatggaagggttgaataaagtgatgcacggtgagccacggcaggagaaagagctgcgtaagctggcagatgatatcaacgttctctacaccgccattaagctgtatctggcgcggatgccaaaagaagagctggcggaggaagagagccgccgctgggcagagatcatcgaaatgagcctcaaccttgaacaggcctccgatatcgtcgagcgcatgggcagcgaaattgctgacaaaagtctggcagcacggcgggcatttagccttgatgggttgaaggaactggatgcgctctatgagcaattgctcagtaatttaaagctggcaatgagcgtgttcttctctggcgatgtcaccagcgctcgtcgtttgcgtcgcagcaaacatcgttttcgcattcttaatcgccgctattcccacgcccacgtcgatcgcctgcatcagcaaaacgtgcagagcattgaaaccagtagcctacatttaggcttactgggagatatgcagcgcctgaacagcctgttttgtagcgtggcttacagtgtgctggaacagccggatgaagatgaaggacgggacgagtattaatattgtgaatcctgtaggcctgataagacgcgtcaagcgtcgcatcaggcactatgaacaagatgccggatcatgcatccggcaattcacttaaaaacggtgaccagcttccagcggaaccgcttcttcaccagccttaaacacataagtggtgttcgggccacccagcgtagcgtgacctttactcactgtgatccagttaccttccggtagaccaataatcgtcagttctggcgcgacgaccagcagttcgcgaatacgctgctcacgggtttcacctttatggccttccggcagcgcgttggtgaagtgcgggttgatttgcagcgggaacagatttagcgcatcgaaaccttgcggatcgacaatcggcatatcgttggtggtacgaatagttgggcaagcaaggttagcgcctgcgctccagccaatatacagagcgccacgtttaaccacgtcagtaattggtgccagcagcccgcgctcgcggcactgtttcagcaactggaaagtattcccgccgccgacaatcacgatctcagcattttcaatcgcggcaacgggatcgacaacgctatgaataccggtgacagaaacacccagcggagcgagaaccgcagccgttttcgctgtgtaatcatcccaggtctgcgttacgccagcgaaagggataaacaccgcactgcggcgaccctgcaactgttcagcaattagcggcagtgcatgttccagccaggctttacccggcagcgtgctgttactcaataaaagcagttccattacttctccggttagtaagaaatcacgggaggcatgctaccactgcgaatttaaccacttactgacatggctcacgatgtcgcacattgcttctggaaagtgatttgagcaggtaacgaattcaagccaatggaaataacaaatagttcgctcatgactattttttatcaacccaaaggtacggtatattccgttttttacaggagaatttatgctgcccgacagtagtgtccgtttaaataaatacatcagcgaaagcggaatttgcagtcgccgcgaagcggatcgctatatcgagcaaggcaatgtgttccttaatggcaagcgagccaccattggcgatcaggtgaaacccggcgacgttgtgaaagtaaacggtcagttgattgaacctcgggaagccgaagatttggtacttatcgccctgaacaagcccgttggtattgtaagcaccaccgaagatggcgagcgcgataacattgtcgatttcgttaaccacagcaaacgcgtgttcccgattggccgcctggataaagactcccaggggctgattttcctcaccaatcacggcgatctggtgaataagatcctgcgtgctggcaatgatcatgagaaagagtatctggtgacggtcgataaaccgattaccgaggagtttattcgcggcatgagtgcgggggtgccaatcctcgggacagtgaccaaaaagtgcaaagttaaaaaagaagcgccgtttgtcttccgcattaccctggtgcaggggctgaaccgtcagatccggcgcatgtgcgagcatttcggctatgaagtgaaaaagctggaacgcacgcgcatcatgaacgttagcttaagcggcattccgctgggggaatggcgcgatttaaccgacgatgagttaatcgacctctttaagctcattgaaaattcctcttccgaggtaaaacctaaagcgaaggccaaaccgaaaacagcgggcatcaaacgtccagtcgttaagatggaaaaaacggcggaaaaaggcggtcgcccggcgtccaacggtaagcgttttaccagcccggggcgtaaaaagaaggggcgctgattaacgcctcagactgatgaaaacggcccaaaagtgcccggacagtcccctcgccccttcgggaaaagggttagggtgaggggaaaattgtgttcacactgacgagtgaaaatctcaggcgttgattgtggattagcgcctgccgcgcgtgctcgtatttgcactccagctaaaactcgcttcaggatccggtttataagcctgctttttcttcaactggcgggcttttttcgcttcagcctcacgctcaaccattaatttatcgatgtaatctttcttaatgctgttggtttcggagttggtcaatacgcgaccatgcgcaatccgcgcccgatccagcagtgttttaagttcacgctgctcgcgttcagtcatctctttttgggtaatacgggggagtgccatgatggtgccctcagtgagccagagagttcagtgtacgggaattcgtttgcgagcagaactgataatattcattttgccttctcttaactatttatctctttcgataattaattagagatgcagataaaaaaattaaaggcaattattctccgataaagacgctggttaacagagtacaggctcgtttattgatgagcatagtgacaagaaaatcaatacggcccgaaatatagcttccaggccatacagtatttactcaaacaaattactatgcagtttttgcaccacctgctcggcatcttcgccgggcaccaggaagcacaggttatggctggatgcgccataacaaatcatgcgaatgttgaacggttccagtacgccgaatacctctttgccaacgccgcaggctttactcaggtcattgccaatcaacgcgaccagcgccagaccttcttccacctccacccgacacagtgcggaaagctccatcagcagagattgcgtcagcaacgtatcgccagtggaggtactaccggtggtatcaagggttaatgccacgctcacttcactcgtggtgattaagtctacgctaatattatgccgcgcgaggatgccgaaaacttccgcgaggaaaccgcgagaatgcagcatattcaggctgtgcaaagtgagcagagtctgattgcgacgaagcgccagagcgcggaacagcggcggattttcagttttattgcacaccagcgtaccacctgcgcgtgggtctttgctggagccgacaaagaccgggatatcgctgcgtactgcgggtagcaacgttgccggatgcagtacttttgcaccaaaagttgccatctctgccgcttcggcaaacgcgatttcatcaatgcgttttgctgcggaaactacgcgtggatcggtggtgtagatgcccgggacgtcggtccagatatcaacacgagatgcgtgtaaagcctccgccagcaaggctgccgtataatcgctgcctccacggccaagcgtcgttgtacgacctttattttcgctaccgataaatccctgggtgatcactaagccttcattgagacgtgggagcagctgcagcgcggccagttccgccagcgcggctatatctggctctgcacgaccaaatcggtcgttggtacgcatcactttacgtacatcaaaccactgtgcctgaacatcgcgttcgcgcaggatctcaacaaacagcagggtgctcatcagctcgccgtggctgaccagctcatctgtcagcgccggagacgttgccagcgccgccgcttctgccagaacagtaatgttctccagcagacgttcaatctcttcacggataacgttcgggtaacgcagacgttccagaatggcaaactggatgttgcggatagcgtcgagtttttcgaatcgctcgccaggttccagtccttcagctaaagcgaccagcagattagtgataccagcagaagcgctgaggacaactaaacgcacgttggcatcagaaagcacaatatcagcgctgcggttcatggcgtcaaaatcagctacgctggtaccgccaaatttggagacaacaatttcagacataactacctcgtgtcaggggatccattttcagccttggcacaagggaagagcggaagacgggtgggcgcagagcgatacttcgctactattttcacccagaagtgctccaccacttgcgaaacgcccgactgcgaacgcttctggtgacaacccaggggattcagcccctgtagccgatgatgaacgtggccagccgttcaatcacctcggcgatgcaccccctcaggtgttatcacaggactggctcctccaacaccgttacttgggcaacgcgcctcttctggcctgcgctagcgcaggtagtacatttataaataaagggtgagcggggcggttgtcaacgatggggtcatgcggatttttcatccactcctggcggtcagtagttcagctaataaatgcttcactgcgctaagggtttacactcaacattacgctaacggcactaaaaccatcacatttttctgtgactggcgctacaatcttccaaagtcacaattctcaaaatcagaagagtattgctaatgaaaaacatcaatccaacgcagaccgctgcctggcaggcactacagaaacacttcgatgaaatgaaagacgttacgatcgccgatctttttgctaaagacggcgatcgtttttctaagttctccgcaaccttcgacgatcagatgctggtggattactccaaaaaccgcatcactgaagagacgctggcgaaattacaggatctggcgaaagagtgcgatctggcgggcgcgattaagagcatgttctctggcgagaagatcaaccgcactgaaaaccgcgccgtgctgcacgtagcgctgcgtaaccgtagcaataccccgattttggttgatggcaaagacgtaatgccggaagtcaacgcggtgctggagaagatgaaaaccttcagtgaagcgattatttccggtgagtggaaaggttataccggcaaagcaatcactgacgtagtgaacatcgggatcggcggttctgacctcggcccatacatggtgaccgaagctctgcgtccgtacaaaaaccacctgaacatgcactttgtttctaacgtcgatgggactcacatcgcggaagtgctgaaaaaagtaaacccggaaaccacgctgttcttggtagcatctaaaaccttcaccactcaggaaactatgaccaacgcccatagcgcgcgtgactggttcctgaaagcggcaggtgatgaaaaacacgttgcaaaacactttgcggcgctttccaccaatgccaaagccgttggcgagtttggtattgatactgccaacatgttcgagttctgggactgggttggcggccgttactctttgtggagtgcgattggcctgagcattgttctctccatcggctttgataacttcgttgaactgctttccggcgcacacgcgatggacaagcatttctccaccacgcctgccgagaaaaacctgcctgtactgctggcgctgattggcatctggtacaacaatttctttggtgcggaaactgaagcgattctgccgtatgaccagtatatgcaccgtttcgcggcgtacttccagcagggcaatatggagtccaacggtaagtatgttgaccgtaacggtaacgttgtggattaccagactggcccgattatctggggtgaaccaggcactaacggtcagcacgcgttctaccagctgatccaccagggaaccaaaatggtaccgtgcgatttcatcgctccggctatcacccataacccgctctctgatcatcaccagaaactgctgtctaacttcttcgcccagaccgaagcgctggcgtttggtaaatcccgcgaagtggttgagcaggaatatcgtgatcagggtaaagatccggcaacgcttgactacgtggtgccgttcaaagtattcgaaggtaaccgcccgaccaactccatcctgctgcgtgaaatcactccgttcagcctgggtgcgttgattgcgctgtatgagcacaaaatctttactcagggcgtgatcctgaacatcttcaccttcgaccagtggggcgtggaactgggtaaacagctggcgaaccgtattctgccagagctgaaagatgataaagaaatcagcagccacgatagcagcaccaatggtctgattaaccgctataaagcgtggcgcggttaatcatcgtcgatatgtaggccggataaggcgttcacgccgcatccggcaaccgatgcctgatgcgacgcggtcgcgtcttatcaggcctacaggtcgatgccgatatgtacatcgtattcggcaattaatacatagcacgattgattaaataaccttaataacaatgccgacgttatgtcggcatttttttatcagataaatccccttgtctgtaatttaacggaaatcataccgtgaggttaatcctaaaatagatttttaatcgttgtttatttcggaaaatacgcagattaattgcttttgtttttattttaagtttatgatttttattgttatttaaatataagttgaaacttatatttgatattcattccaattatcctaaaacgccatcgctaattccccgcgccgtaattcgcatgctttagttgtgtatactcgatcccgcccgaaatgtttttgggtaaatctccattcattcaatgaagggaaattgttatgaaaaaagttctgtatggcatttttgccatatctgcgcttgcggcgacttctgcgtgggctgcacctgtacaggtgggcgaagcggcagggagcgcagcaacgagcgttagcgcggggagttcctccgcgaccagcgtcagcaccgtaagcagcgcggtgggtgtcgcgcttgcggcaaccggtggcggtgatggttctaataccgggaccaccacaaccacgaccaccagtacccagtaataaagtatgtatccccaaaataattcgagtcattgcatctgtggctagaagtatgaagggattaaccataaccacactccggtgtggttattctgcccctctggagaagagtcgtgaagcgacctgcactcattcttatctgcctgttattacaggcctgtagtgccacgactaaagagctgggcaatagtctgtgggacagtctgttcggcacgccaggcgtacagctgacggatgatgatattcaaaatatgccctacgccagccagtacatgcagcttaatggcgggccgcagttatttgtggtgctggccttcgctgaagacggacaacaaaaatgggtcactcaggatcaggctactctcgttacccaacatggccgtctggtgaagactctgctcggcggcgacaacctgattgaagtgaataaccttgctgccgacccgctgattaaacccgcacaaatcgttgatggcgcaagctggacgcgcacgatgggctggaccgagtaccagcaggtacgctacgccaccgcacgcagtgtcttcaaatgggatggcaccgataccgtcaaagtcggcagcgatgaaaccccggttcgcgtgctggacgaagaagtctccaccgaccaggcgcgctggcataaccgctattggatcgacagcgaagggcaaattcgccagagcgaacagtatctcggcgcggattattttccggtgaaaaccactctcatcaaggcggcaaaacaatgattaaacaaactattgtcgcgttgcttttgagtgtgggagcgagtagcgtcttcgcggcaggaaccgtcaaggtgttcagcaatggcagcagtgaggccaaaacgctaacgggcgcagagcatttaatcgatctggtaggccaaccgcggctggcaaacagctggtggcccggtgcggtgattagcgaagagctggcaacggcggcagcattgcgtcagcagcaggcgttgctgacacggctggcagaacagggcgcagattccagcgccgacgatgccgctgcgattaacgccttacgccagcaaattcaggcgttgaaagtgacgggcaggcaaaaaatcaatcttgatcccgatatcgtccgcgttgccgaacgcggtaacccgccgttgcagggcaactacacgctgtgggtcggaccaccgccgtccacggtcacgttgttcgggcttatcagccgtcctggcaagcagccattcactccaggtcgcgacgtggcgagctatctctctgaccagagcctgctcagcggtgcggatcgcagctacgcgtgggtggtttacccggacggacgcacgcaaaaagcgccggtggcttactggaacaagcgtcacgtagagccgatgcccggcagcattatttatgttggcctcgcggactccgtctggagtgagacgcctgatgcccttaacgccgacattcttcagactctgacgcagcggatacctcaataatgaaaaaaagacatctgcttagcttactggcgctgggcattagcacagcttgctacggcgaaacatatcctgcgcccattggtccgagccagagcgatttcggtggcgtaggattattacaaacgcccaccgcgcgtatggcacgggaaggggagttgagtctgaactatcgcgataacgatcagtaccgttattacagtgctagtgtgcaactcttcccgtggctggaaacaacgctgcgctacaccgacgtgcgcacccggcagtacagcagcgtcgaagcgttctctggcgatcaaacgtataaagataaagccttcgatctcaaactgcgtttgtgggaagagagttactggctgccgcaagtggcggttggtgcgcgggatatcggcggtacggggctgtttgatgcggaatatcttgttgccagcaaagcctgggggccgttcgattttacgctcggcctgggctgggggtatttgggcaccagcggtaatgtgaaaaatccgctctgtagtgccagtgataaatattgctatcgcgataacagctacaaacaggcgggatctatcgacggtagccagatgttccacggtcctgccagtctgtttggcggcgtggaataccagacgccctggcaaccgctgcgcctgaaactggagtatgaaggcaataattatcagcaggattttgccgggaagctggagcaaaaaagtaagtttaacgtcggtgcgatttatcgcgttaccgattgggccgacgttaaccttagctatgaacgtggcaacacctttatgtttggcgttacgttgcgcaccaactttaacgatctgcgcccgtcttacaacgataacgcccgcccgcaatatcaaccgcagccgcaggatgccattttgcagcatagcgtggtggcgaatcagttaacgctgttgaaatacaatgccggacttgccgatccacagatccaggcgaaaggcgatacgctgtatgttaccggcgagcaggtgaaatatcgtgatagccgcgaagggatcatccgtgcgaatcggatcgtgatgaacgatctgccggatgggatcaaaacgatccgcattacggaaaatcgccttaacatgccgcaggtgacgacggaaaccgatgtcgccagcctgaaaaatcatctcgccggagagccgttgggccacgaaacgacgctggcgcaaaaacgcgtcgagccagtggttccgcagtccaccgagcagggctggtatatcgacaaaagtcgctttgatttccatatcgatccggtgctgaaccagagcgtcggtggcccggaaaacttttacatgtatcagctgggcgtgatgggaacggcagatttgtggctgacggaccatctgctgaccaccggcagcctgtttgcaaatcttgccaacaactacgacaagtttaactacactaatcctccgcaggacagccacttaccgcgcgtgcgtacccatgtgcgcgagtatgtgcagaacgatgtctatgtgaataacctgcaagccaactacttccagcatctgggcaacggcttctacggtcaggtctacggtggttatctcgaaaccatgtttggcggtgcgggggcagaagtgttgtatcgcccgctggacagcaactgggcgtttggtctggatgccaactacgttaaacagcgcgactggcgtagtgcaaaagatatgatgaaattcaccgactacagcgtgaaaaccggacatctgaccgcctactggacgccatctttcgctcaggatgtgttagttaaagccagcgtcgggcagtatctggcaggggataaaggcggcacgctggagatcgccaaacgctttgatagcggcgtggtggtgggtggctatgccacgatcactaatgttagcaaagaggagtacggcgaaggggacttcaccaaaggcgtgtatgtcagcgtaccgttggatctcttcagctctggcccgacacgcagccgtgcggcgattggctggacgccgctgacgcgtgacggtggtcagcaacttgggcgtaagttccagttgtatgacatgaccagcgaccgtagcgtcaatttccgctaagtcatgggaaaggtgccagttttcgcactcactggcaccttcattcttaatggcctgtcgagccatcaggaacgcagttcactcccggtttgcgatctggtgtgtaaaggcgaaaacattctgtcttcctgtccgtcgatatcggttgcaggtctggttgcctgagcgactgggccatcattgggctggagacattgctttgcggtaggtcggctttatcagcagtaccgagcggaccagcataagcaggaagaacagagactgataacatcaaagcagcaaaataaggcttcatttttaccacctttatcaggttacgtttcatttgttccagaggaacattgtcgatttttcgcgcattgctggtggctgggaatcacctgaatgggtgatttttgaattaccggctttggtgcggtttgtcttgccggatgcgccgccaggcgcggcttatccggcctacgggtaggtatatccggctttggtggaggcgcgctccaaatccaggttgaacaaaacatacacaaaaaatatagatctccgtcacatttttgcgttatacaggaagctcgccactgtgaaggaggtactgctatgacgagtctctctcgtccgcgcgtggagtttatctccaccattttgcagaccgtactcaatcttggcctgctgtgcctcggcctgattttggttgtcttcctcggcaaagaaacggtgcatctggctgatgtgctgttcgcgccagaacaaaccagcaaatatgagctggtagaaggactggtggtttactttctctatttcgaatttatcgcgctgattgtgaagtactttcagtccggttttcacttcccgctacgttactttgtctatattgggatcaccgccattgtgcgcttgatcatcgtcgatcataaaagcccactggatgtgttgatctacagcgctgcgatcctgttactggtgatcaccctgtggctgtgtaatagcaaacggctgaagcgggagtaaaaagtcagcacgccgaaatggcgcggcgtgctggacaggaagattacagcgtagcagtttgttgtgttttcttcgtttccggttcccagagcgcttccagctcctcaagggttttacctttggtttccgggacaaatttccacataaacagtgctgccagaacgcccatacaaccgtaaatccagtaggagaaaccgttgtggaaatgggccaccagccaggagtttttgtccatcatcgggaaggtccaggagacgaagtagttcgccagccactgggccgccaccgcgattgccagcgctttaccacgaatagcattcgggaagatttcgctcagcagtacccagcataccggaccccaggacatggcaaaggcggcaacatagaacagcatgctcagtagcgccacaatacccggtgcctgagtgtaaaacgcggtaccgaggctaaacataccgattgccattccgagtgcgccgataatttgcagtggcttacgaccaaatttatccaccgtcataattgccagaacggtgaaggtgaggttgataactccgacaataatggtctgcaacagcgcgatatccgtgctggcccccagcgttttgaacacttccggcgcgtagtacagcaccacattgatgccgacaaattgctggaagatggagagcattacgccgattacaatcacgcccacgccaaacatcagcagacgaccaccggttttgcggccatgatccagggagtgtttaatttcctgtactgcctgagttgcaagcgtgttgcccataattttgcgcaggataccttccgcctgttcttgcttgccgcggctcatcagccagcgaggactttctggcacggtatacagcagcattaagaacagcagtgcagggatacattcgctggcaaacatataacgccagccgtcagtattcagccagctggcatcaccggaacgggcaataaaatagtttacgcagtaaactaaaagttgcccgaaaataatcgcaaactggttaaaagagaccagtttcccgcgaatatgagctggagccagttccgcaatatacattgggctgagcatactggctaaaccaacgccaataccgccaataatgcgataaataacaaattccgggacataacctgccagataaacaggcacagtgttgtccgggtttatagaggtaaaaccaagttctggccaggcagaacctacaccagaaataaaaaacaggacagcagcaatcttaagactatcacgacgaccgaagcggttactgcaataaccaccgagggcaccgccgatgatgcaaccaatcagagcgctggccacgcaaaaccctaacagggagttggcagcggattcacttaagttttgtggagcaacaaagacggtattgagactctcaacagtaccggaaataacggcggtgtcgtagccaaataataaaccacctaatgtagcgactaaggtaatgctaaatatataactggaattatactgggtattcattcagacctgccttagaccattctgatcttttatcagtgcattgatgttggaattgtcaggcagttaaggcaattatcattttttacaatgcgtttacgtaatgtcttttctgtgatcttaattgtgataattatccaaaattgataaaaacaatactattgccgtgactcagagcacgaaagagaattatcgtaagtgggaaaacaaataacgtaaaaataataagctctatgatggaaatattaaccggcgaacgattcagattgcagacgaaagaaaaaaaggcgctccgtggagcgccgaataacagtcacaagttgggataacgtaagttgagggtgcagcggcataacattggcagaacaacatctttaacctttcacaccacctgccgtcaggccgttgaccagccagcgttgagccagcaagaagacgatggtgatcggtaatgcagacatcacggcagcggcggcaaagtcaccccacaggtagttttgcgggttgaggtattgctgcatccccacggccagggtgtagctgtttacgtcacgcagtaacaggctcgcgaccggaacttcagtaatggcagcgataaagctcaggatgaataccaccgccagaatcggtacactcagcggcaacaggacaaggcggaaggcctgccacggtgtcgcaccatccagcgcagcagcttcttccaggctactgtcgatggtttcgaaatagcctttgatggtccagacatgcagcgcaatcccacccagatacgcgaaaattacgccgccgtgagtattcaggccaatgaatggaatgtactcacccagacgatcaaacaacgcatacaacgcgaccagactaagtactgccgggaacatctggaaaatcagcattcctttcagcagcgtcgctttgcctggaaagcgcatacgggcgaaagcgtaggcgcaggtggtggagagcgccacaatgccaatcgcggaaatcccggcgacctttacgctgttccacagccacagcagtaccgggaatggcggtggcgtaatgcgaccatcagcctgttcaacgctaaaacctaacgccagtttccagtgatcccaggagatttgctccgggatcaggctgccggtcgcaaagtttccctgacgcaggctgatagcgacgaccatcagcagcgggaacataatcgctgcgataaaaagtagcagtagcaggtgagtaataaataaacgagctttttggcttttcggttggaccattgccatttttgttatctcccttaatcaaacttcattcgcgtggctttcaggttcactatcgccagcgcacccaccagcaggaagatcagcgtggcaattgctgccgccagaccgaagtcctgacccccgccgccttcaaaagcgatgcggtaggtgtagttaacaagcaggtcggtataaccggctggcgtggtcgtgccaagacgatccgggccgccgttggttaacagttgaatcagcacgaagttgttaaagttaaaggcgaagctggcgatcatcagcggcgtcagcggtttaatcagcagcggcagcgtaatcttaaagaagttctggaacggacctgcgccatccattgcactggcttcatacaaatcgtccggaatcgctttcagcaagcccatgcagaggatcatcatgtacggataacccagccaggtattgacgataattagcatcgtgcgggcggtggtcggatcgctgaaccaggcgggcttcacgccaaacagcgcgctcaacatcatgttgatttcaccgaagctctggttaaacaaccctttgaaaatcaagatactaatgaagcttggcaccgcgtagggcagaatcagcaggacgcgatagaccgctttgccgcgcaacgcttcccactgcaccagacacgccagaaccatgccgaccgccaccgttaaaaagacagtgatcaggctgaacaccacggtccagacgaaaatggcgaggaacggtttctgaatgccttcgtcggtaaagacgcgggtaaagtttttccagccggtggtcacggtgtaaccggggcttagcttttcatcaccccagttgccgtcggcggtaatggactggtaaaagccaatttggttattcggacgatatttcacgccgctctgattattcgtcaacgtgccgtcaccgtcgagtgtgtagagcggctgcgtgccagaaaactggcgcagggagctcatcatcactttgttgccatccggcagaatggcggtaatgtcactcagcgcctgacgattctgggtaatcacgcgcagattcgcgcgttcgccttcgggctgggcggtcgtttctttcagttgcagtttttgctcgccgccaaatttaaaagcgtcggagaggtaatttttgccggtttcgccgtcgctgagcgccagttgccactcatcgcccgccgggtaaagaccaaagttataggttttgcctgcttgccaggagcgatctaacaacacttcctgcgcacgttcaaaagtcagctggttagtgctgctgtagttggtgaaggcaatggcgatggtgcagaccagagggaagaggacgaataatcccattccagccattcccgggtaaacatagcgccaggcgtaggctttacgattggcgaaaatatacagccccgcactactcaatatcagcgtggtaatggcgaacaggtattccccttgtgcgtacattaaaacaacaaggtaacccaccagcaggccgagcagacctagcacactccatttcagcgcgtcgctttgccaccaatgtttctttttaatgacatccatggggttcttcctcattccaggacggataaggctttcacgccttatccgacaacaactgcctgatgcgacgctgacgcgtcttatcaggcctacatacgtttcggttttgtaggccggacaaggcgttcacgccgcatccggcatttcacagcattacttggtgatacgagtctgcgcgtctttcagggcttcatcgacagtctgacgaccgctggcggcgttgatcaccgcagtacgcacggcataccagaaagcggacatctgcgggatgttcggcatgatttcacctttctgggcgttttccatggtggcggcaatacgtggatctttcgccaactcttcctcgtaagacttcagcgctacggcacccagcggtttgtctttattaaccgcttccagaccttcatcagtcagcagatagttttcgaggaactctttcgccagctctttgttcggactggcggcgttaatacctgcgctcagcacgccaacgaacggtttggatggttgacccttgaaggtcggcagtaccgttacaccataattcactttgctggtgtcgatgttggaccatgcccacgggccgttgatggtcatcgctgtttcgcctttattaaaggcagcttctgcgatggagtaatcggtgtctgcattcatgtgtttgtttttaatcaggtcaaccaggaaggtcagacccgctttcgcgccagcgttatccacgcccacgtctttaatgtcgtacttgccgttttcatacttgaacgcataacccccgtcagcagcaatcagcggccaggtgaagtacggttcttgcaggttgaacatcagcgcgctcttacctttcgctttcagttctttatccagcgccgggatctcttcccaggtttttggcgggttcggcagcagatctttgttataaatcaggcttaacgcttcaacagcgatcgggtaagcaatcagcttgccgttgtaacgtacggcatcccaggtaaacggatacagcttgtcctggaacgctttgtccggggtgatttcagccaacaggccagattgagcgtagccaccaaagcggtcgtgtgcccagaagataatgtcagggccatcgccagttgccgcaacctgtgggaatttctcttccagtttatccggatgctcaacggtgactttaattccggtatctttctcgaatttcttaccgacttcagcgagaccgttatagcctttatcgccgttaatccagattaccagtttaccttcttcgattttggcgagagcgctggcggaaaacatcatcgtcgttaatgcggataatgcgaggatgcgtgcacctgtttttattttcataatctatggtccttgttggtgaagtgctcgtgaaaacacctaaacggactctagtttctttatacggcaacctctttccatcctccttgcccctacgccccaccgtcgctttgtgtgatctctgttacagaattggcggtaatgtggagatgcgcacataaaatcgccacgatttttgcaagcaacatcacgaaattccttacatgacctcggtttagttcacagaagccgtgttctcatcctcccgcttcctcccccataaaaaagccagggggtggaggatttaagccatctcctgatgacgcatagtcagcccatcatgaatgttgctgtcgatgacaggttgttacaaagggagaagggcatggcgagcgtacagctgcaaaatgtaacgaaagcctggggcgaggtcgtggtaagcaaagatatcaatctcgatatccatgaaggtgaattcgtggtgtttgtcggaccgtctggctgcggtaaaagcactttactgcgcatgattgccgggcttgagacgatcaccagcggcgacctgttcatcggtgagaaacggatgaatgacactccgccagcagaacgcggcgttggtatggtgtttcagtcttacgcgctctatccccacctgagtgtagcagaaaacatgagttttggcctgaaactggctggcgcaaaaaaagaggtgattaaccaacgcgttaaccaggtggcggaagtgctacaactggcgcatttgctggatcgcaaaccgaaagcgctctccggtggtcagcgtcagcgtgtggcgattggccgtacgctggtggccgagccaagcgtatttttgctcgatgaaccgctctccaacctcgatgctgcactgcgtgtgcaaatgcgtatcgaaatctcccgtctgcataaacgcctgggccgcacaatgatttacgtcacccacgatcaggtcgaagcgatgacgctggccgacaaaatcgtggtgctggacgccggtcgcgtggcgcaggttgggaaaccgctggagctgtaccactatccggcagaccgttttgtcgccggatttatcggtagcccaaagatgaacttcctgccggtaaaagtgaccgccaccgcaatcgatcaagtgcaggtggagctgccgatgccaaatcgtcagcaagtctggctgccagttgaaagccgtgatgtccaggttggagccaatatgagcctgggtattcgcccggaacatctactgccgagtgatatcgctgacgtcatccttgagggtgaagttcaggtcgtcgagcaactcggcaacgaaactcaaatccatatccagatcccttccattcgtcaaaacctggtgtaccgccagaacgacgtggtgttggtagaagaaggtgccacattcgctatcggcctgccgccagagcgttgccatctgttccgtgaggatggcactgcatgtcgtcgactgcataaggagccgggcgtttaagcaccccacaaaacacacaaagcctgtcacaggtgatgtgaaaaaagaaaagcaatgactcaggagatagaatgatgattactctgcgcaaacttcctctggcggttgccgtcgcagcgggcgtaatgtctgctcaggcaatggctgttgatttccacggctatgcacgttccggtattggttggacaggtagcggcggtgaacaacagtgtttccagactaccggtgctcaaagtaaataccgtcttggcaacgaatgtgaaacttatgctgaattaaaattgggtcaggaagtgtggaaagagggcgataagagcttctatttcgacactaacgtggcctattccgtcgcacaacagaatgactgggaagctaccgatccggccttccgtgaagcaaacgtgcagggtaaaaacctgatcgaatggctgccaggctccaccatctgggcaggtaagcgcttctaccaacgtcatgacgttcatatgatcgacttctactactgggatatttctggtcctggtgccggtctggaaaacatcgatgttggcttcggtaaactctctctggcagcaacccgctcctctgaagctggtggttcttcctctttcgccagcaacaatatttatgactataccaacgaaaccgcgaacgacgttttcgatgtgcgtttagcgcagatggaaatcaacccgggcggcacattagaactgggtgtcgactacggtcgtgccaacttgcgtgataactatcgtctggttgatggcgcaagcaaagacggctggttattcactgctgaacatactcagagtgtcctgaagggctttaacaagtttgttgttcagtacgctactgacagcatgaccagccagggtaaagggctgagccagggttctggcgttgcatttgataacgaaaaatttgcctacaatatcaacaacaacggtcacatgctgcgtatcctcgaccacggtgcgatctccatgggcgacaactgggacatgatgtacgtgggtatgtaccaggatatcaactgggataacgacaacggcaccaagtggtggaccgtcggtattcgcccgatgtacaagtggacgccaatcatgagcaccgtgatggaaatcggctacgacaacgtcgaatcccagcgcaccggcgacaagaacaatcagtacaaaattaccctcgcacaacaatggcaggctggcgacagcatctggagtcgcccggctattcgtgtcttcgcaacctacgccaagtgggatgagaaatggggttacgactacaccggtaacgctgataacaacgcgaacttcggcaaagccgttcctgctgatttcaacggcggcagcttcggtcgtggcgacagcgacgagtggaccttcggtgcccagatggaaatctggtggtaatagcaaaacctgggccggataaggcgtttacgccgcattcggcaaccaacgcctgatgcgacgcttgcgcgtcttatcaggcctacaacggctgtcaaatgtaggccggataaggcgtttacgccgcatccggcataaaaacaggttgtcattatctgaaaggggcgaaagcccctctgattatcgggtttagcgcgctattgcctggctaccgctgagctccagattttgaggtgaaaacaatgaaaatgaataaaagtctcatcgtcctctgtttaagtgcagggttactggcaagcgcgcctggaattagccttgccgatgttaactacgtaccgcaaaacaccagcgacgcgccagccattccatctgctgcgctgcaacaactcacctggacaccggtcgatcaatctaaaacccagaccacccaactggcgaccggcggccaacaactgaacgttcccggcatcagtggtccggttgctgcgtacagcgtcccggcaaacattggcgaactgaccctgacgctgaccagcgaagtgaacaaacaaaccagcgtttttgcgccgaacgtgctgattcttgatcagaacatgaccccaagtgccttcttccccagcagttatttcacctaccaggaaccaggcgtgatgagtgcagatcggctggaaggcgttatgcgcctgacaccggcgttggggcagcaaaaactttatgttctggtctttaccacggaaaaagatctccagcagacgacccaactgctcgacccggctaaagcctatgccaagggcgtcggtaacagcatcccggatatccccgatccggttgctcgtcataccaccgatggcttactgaaactgaaagtgaaaacgaactccagctccagcgtgttggtaggacctttatttggttcttccgctccagctccggttacggtaggtaacacggcggcaccagctgtggctgcacccgctccggcaccggtgaagaaaagcgagccgatgctcaacgacacggaaagttattttaataccgcgatcaaaaacgctgtcgcgaaaggtgatgttgataaggcgttaaaactgcttgatgaagctgaacgcctgggaagcacatctgcccgttccacctttatcagcagtgtaaaaggcaaggggtaattacgccccacagtgctgattttgcaacaactggtgcgtctcctggcgcacctttttttatgcttccttcctgggatatgagcgattttttatagtaactcacttcttcttcactaagaatatccattatctcaatgccttatcagagattcttttcctttcgccggtagtgtctggacattcaggctacttttccaggttattttatttctgttatgcagaggttttatgataagtcatatcctaaattctggcggcaataactctttgatgaaacatgatgtggtgcaaggaaataatatagtagatcttgatttactacgtaatttaaatggggtgccaggtttaaacagagataactttatttatatcagcaatattttttcaaatataaaacaacggaacgaaaaaatcatgcaataaatatgtttcgtgaagtctcaatcagtaatgatactataagtgtaaaattctacagaaatgaaaaaaattgaatgcgcttgcaattttctgatggataaagatgcgcaggggtatatcgacctgtctgatttggatttaacaagttgtcattttaaaggtgacgttataagcaaggtgtcttttttaagtagtaatctacaacatgtaacattcgaatgtaaagaaattggggattgcaattttactactgcaatagttgataatgtcatatttagatgtcgacgtttacacaatgtgatttttatcaaagcgagtggtgaatgtgtcgatttcagcaaaaatattcttgatacagttgacttcagccagagtcaacttggtcatagtaattttcgcgaatgtcagattagaaatagtaacttcgataattgttatctttacgctagccacttcaccagagcagagtttctgtctgccaaagaaataagttttattaaaagcaatttgacagctgttatgtttgattatgtgcgaatgagcacagggaattttaaagattgcattacagaacaattggaattaactattgattatagtgatatattttggaatgaagatctcgatggttatatcaataacattataaaaatgattgatacattgccagataatgcaatgatattgaaatccgttctggccgtaaaactggtgatgcaattaaaaatacttaatattgttaataaaaactttattgagaatatgaagaaaatatttagccattgtccttatataaaagatcccattatacgcagttatatccattctgatgaagataacaagttcgatgattttatgcgtcaacatcgattcagtgaggtgaatttcgatacccaacagatgatcgattttattaacagatttaatacgaataaatggctaattgataaaaataacaatttttttatccaacttatcgatcaggccttacgaagtacggatgatatgatcaaagcaaatgtttggcatctttataaagagtggattcgtagtgatgatgttagtcctatatttatagaaactgaagataatttaagaacctttaacacgaatgaattaacacgaaacgataatatctttatcctgttctccagtgtcgatgatgggccagttatggtggtaagctcccagcgcttacatgatatgttgaatcctacaaaagataccaattggaattccacgtatatctacaaatccagacatgagatgttgcctgttaatcttactcaggaaacacttttcagctccaaatctcatggtaaatatgcgcttttccccatttttactgcgagttggcgagctcatcgtataatgaataagggtgtttaagtaaaggaaaacatcaccgttcctggcatcctggacggtgatgcccctacggttgccctcgccagcacgggcatcggtaaagcgtaaggttcaacatcgttttaccacttcatgcgattgttgcgtttttgttgcgtattagatcacttaatttgctttacatctcccgtaaacacttttctgcgatacaatgcctttacgttatgtaacggagagttcggcatgagtcaccccgcgttaacgcaactgcgtgcgctgcgctattgtaaagagatccctgccctggatccgcaactgctcgactggctgttgctggaggattccatgacaaaacgttttgaacagcagggaaaaacggtaagcgtgacgatgatccgcgaagggtttgtcgagcagaatgaaatccccgaagaactgccgctgctgccgaaagagtctcgttactggttacgtgaaattttgttatgtgccgatggtgaaccgtggcttgccggtcgtaccgtcgttcctgtgagtacgttaagcgggccggagctggcgttacaaaaattgggtaaaacgccgttaggacgctatctgttcacaagtagcacattaacccgggactttattgagataggccgtgatgccgggctgtgggggcgacgttcccgcctgcgattaagcggtaaaccgctgttgctaacagaactgtttttaccggcgagtccgttgtactaagaggaaaaaaatatggagtggagtctgacgcagaataagctgctggcgtttcatcgcttaatgcgtacggataagccaattggcgcgttactgctgctctggccaacattatgggcgttgtgggtggcgacaccgggcgttccccagctctggatcctggcggtgtttgtcgcgggtgtctggctgatgcgcgctgccggatgtgtggtgaatgattatgctgaccgcaagtttgatggtcatgttaagcgcacggcgaaccgaccacttcccagcggcgcggtaacagagaaagaggcgcgcgcgctgtttgtcgtgctggtactgattagctttttactggtgctgacgctgaatacgatgaccattctgttgagcattgccgcgctagcgctggcgtgggtgtacccgtttatgaagcggtatacccatctaccgcaagtggtgctgggcgcggcgtttggctggagcattccaatggcttttgccgctgtgagtgagagcgtgccattgagttgctggttaatgttcctcgccaatattctctgggcggtggcttacgacacgcagtatgcgatggttgaccgcgatgatgatgtgaagattggcattaaatccacggcaatcctgttcggccaatacgataaattgattattggtattttgcagattggcgtactggcactgatggcgatcatcggtgagttaaatggcttaggctggggatattactggagtattctggtggctggcgcgctgtttgtttatcaacaaaaactgattgccaaccgcgagcgtgaagcctgctttaaagcatttatgaataataactatgttggtctggtactatttttagggctggcaatgagttactggcatttctgatgatgtaaaaaagccggatgatcatccggctttcttctgggttgcctgatgcgcggcgcttctcaggcctacacaacacatcgcaatttattgaatttgcagattatggaaggccggataaggcgttttcgccgcatccggcaattctctctgattacccttcgccctgcgtcgcactctcaatcgtcaaacgcacgtcacttgtaatcaactccgccagcaactgataaaccttcatcgtttctgccggttcggcatcgccgctatcgctgatatacccttcatcacgcagtgtcagcaccagagaactgaacaccgccttgtcgaagaactccggcgcgttgatgccgtgcagcacggagagacgttgcgcgacggtgcggctctctttctccagcgtaccgcggttgatgctcgggttggcactcaacaaccagaaggtgatggcataacgttgcagcgtttcgcgcgcgcctgcggccagcagctgtagcgtgcgagaatgcgccgggttgatatgcaactcatcatcttgcagggtaatcagcccctgacgttgcatctcatttgccagcgcatcaataacgtccggcaactcgtcgcgatcccagcgcaggaacagctccgctttcagcattgggtaaagcacattgacgtgctccatcaatacgtcgcgggagatgtggcgatgctgggtgacgattgccgccatcaggctaggcagcaccaacatatgcgcaatgttgttgcgatagtaggtcatcagcaccgcttgctcgcgcggcagaatgatgatgtcgccgattgtgtctttctcgacttcaaacttgttcatttgcagcgcgtgatcgataagctcgctggcgctggcactaggaacggtagagtccgtggagtagggcacgttgcgcatcagatccaggtagcagttgagttgctcggttaactgctcgcgggtgagactgcgctgacgacttgccagtagcgcagtacagcacaggttcatggcgtttgccgcgcctgcgttgttaatgcgtaccatcagatcggcagcaatattattgaccgtcggcgttaaccatgccggacgcaccgcttcgatgggatcgatagattcacgccagtcaggtacatgctggttaaggtaggtcatcaacggcattggttcaccgaagttgacgtaaccctgaccgagattacgcagcttgcttaaaccgcgcagcatctgcggcaggctctctttctctttcgtcgcgccgcgcagttctttggcgtaagtacccacttccatgacgtgctcataaccgatatagatcggaatcagcgtaatcggacgcgtgccgccacgcagcatcgcctgaatggtcatgctcagcgtaccagttttcggatccagcaaacgccccgtacgggaacgaccgccttccacgaagtactcgacggaataaccacggctgaacagttcgccgagatactcccggaaaacggtggaataaagtttattgcctttaaacgtacggcgaataaagaacgcccccagacggcggaaaatcggcccggcaggccagaaattcaggttgatcccggcggcgatatgcggcggcaccagcccctggtgatacagcacgtaagaaagcagcaggtagtccatgtgactgcggtggcaaggcacatataccagctcatgaccgtcgtgggccagctggcgaacgcgctcagcgttatggacgttgatgccctggtaaagtcggttccaggtgaagcccagaatacggtcagtcaggcgaatcatctcgtaagagaaattcgccgcaatctcttccatcagtgcaatcgcgttctgctgcgctttttcatgggagatttttttgctgcgcgcttcatcttctaccgctttggcaatggcgcgggaggcgagcagcttattaaacagatcctgacgagcaggcaaacgtgggcctacggcagccagacgttgacgggcaaagtgcatacgcgccacgcgcgccagtttctgagcgatagttttatccgtgccgtgttcatccgccatacggcgcaggctaacactcgggctgaaacgcacaaaactgtcgcgaccgagccacagtacagcgaaaaatttctgtacgccgttaagcatacgcagcggcgggttcacttcgcctttttcacgccccggcgcgcgaccaaacatcacgctcactggcaccatctgcacatccagatttgggttgctacggtgcaaatcgagatagtcgtggaacagcttaatagactcttctttcggcgtgtaataggtgaacacacgcggcccgccgtgaatgaacacatagcgcggcagtagcgtgccgtcgatttccagcggctctaacgggtcaggcaagtcatgtgccagacactgggcgcgcaacgtcagcaaatctgctttgctgttgtacggtaaaacgtacataattggacgagaggtatccagccccagttccggggcaggatctgccggaatagacttgctttttaccaggatgcttaatggtaaattcagtaatttgtagtaaattcgtggccagccggacataaacgatgtaaagcctctggttaataatgcaaatgcgcggcaaggatagcagaaagtcatgggaaattctgtggtatccgctcatgtttcgcgcggcgctacgcaaacccgaatcatcggatttaacggtacactgatattgacgctcataatgtaaaaaggttctttcaatggccaataataccactggattcacccgaattatcaaagctgctggctattcctggaaaggtttacgcgctgcatggatcaacgaagcggcattccgtcaggaaggcgtagcggtattgttggcggtggtcatcgcctgctggctggatgtggacgcgattacccgcgtgctgcttatcagctccgtgatgctggtgatgattgtggaaatcctcaatagcgccatcgaagcagtggttgaccgaattggctctgaataccatgagctttccggacgcgcaaaagatatgggatccgctgcggtgctgattgccattatcgtcgccgtgattacctggtgcattctgttatggagccattttggataacccttccagaattcgataaatctctggtttattgtgcagtttatggttccaaaatcgccttttgctgtatatactcacagcataactgtatatacacccagggggcggaatgaaagcgttaacggccaggcaacaagaggtgtttgatctcatccgtgatcacatcagccagacaggtatgccgccgacgcgtgcggaaatcgcgcagcgtttggggttccgttccccaaacgcggctgaagaacatctgaaggcgctggcacgcaaaggcgttattgaaattgtttccggcgcaagtcgcgggattcgtctgttgcaggaagaggaagaagggttgccgctggtaggtcgtgtggctgccggtgaaccacttctggcgcaacagcatattgaaggtcattatcaggtcgatccttccttattcaagccgaatgctgatttcctgctgcgcgtcagcgggatgagcatgaaagatatcggcattatggatggtgacttgctggcagtgcataaaactcaggatgtacgtaacggtcaggtcgttgtcgcacgtattgatgacgaagttaccgttaagcgcctgaaaaaacagggcaataaagtcgaactgttgccagaaaatagcgagtttaaaccaattgtcgttgaccttcgtcagcagagcttcaccattgaagggctggcggttggggttattcgcaacggcgactggctgtaacatatctctgagaccgcgatgccgcctggcgtcgcggtttgttttagttctctcttcatcaggcttgtctgcatggcattcctcactagttctgataaagcactctggcatctcgccttacccatgattttctccaatatcaccgttccgttgctgggactggtcgatacggcggtaattggtcatcttgatagcccggtttatttgggcggcgtggcggttggtgcaacggcgaccagctttctctttatgctgttgctgtttttacgcatgagcaccaccgggctgactgcgcaggcttatggtgccaaaaatcctcaggcattagcccgtacgctggtgcaaccgttgctgttggcgttgggggctggggcgttaattgcgctgctgcgtacgccgattatcgatctggcgctgcatattgttggcggtagtgaggcagtcctggaacaggcgcggcgctttcttgaaatccgctggttaagcgcaccggcgagcctggcgaatctggtattactcggttggttactcggcgtgcaatatgcccgtgcgccagtaattttgttagtggtcggcaatatcctcaacattgtgctggatgtctggctggtgatggggctgcatatgaacgtgcagggcgcggcgctggcgacggttattgcggaatatgcaacattgctgattggtctgctaatggtgcgtaaaatcctcaaactacgcggaatttccggcgaaatgctgaaaactgcctggcgaggaaacttccgtcgcttgctggcgcttaaccgcgatatcatgctgcgtagcctgttgttgcaactctgtttcggcgcgatcaccgtacttggcgcgcgactggggagtgacattatcgctgttaacgcggttctgatgacgctactcacctttaccgcctatgcgctggatggttttgcctacgcggttgaagcgcactccggtcaggcatacggtgcgcgcgacggtagccagttgctggatgtctggcgggcagcgtgccgccagagcgggatcgtagcgttactgtttagcgtggtttatttgctggctggggaacacatcattgcgttactgacgagcttaacccagattcagcagctggctgaccgctatcttatctggcaggtgattttgccggtggttggcgtctggtgttatctgctggacggcatgtttataggcgcaacgcgtgccaccgaaatgcgtaacagtatggcggtggccgccgcaggttttgcgctgacgctccttacgctgccgtggctgggtaatcatgctttgtggctggcattaaccgtctttctggcgttgcgcgggctttctctggcggctatctggcggcgtcactggcgcaatggtacctggtttgccgcaacgtgacggttaaaaattctgaataaataatcctaagccaaattgctgactacacttaatctcacgttcagaagaaaagtgaacgtactctcattcacaacctaacgatgaggtcttgattatgaataaagatgaagccggcggtaactggaaacagtttaaaggtaaagtgaaagagcaatggggcaaactgaccgatgatgatatgacgatcattgaaggtaaacgtgatcaactggtcggtaaaatccaggaacgttatggttatcagaaagatcaggcagaaaaagaggtcgtggattgggaaacccgcaatgaatatcgctggtaattaatccctcctgcccgacgtgtacaaggatgtacgccctcttaacgcggtttctttttcacctgcacagagtgatcatgctggcactgttcaggatgacgacacgcttccacttctacacatgccgcacagagcccatgtgcttcaatcacattatgccgcagggcaaaccccatttttgccgccagcgtatgcataatgtcttccacgccttctgcacactcttctttcactgcgccgcagcgatcgcaaataaacatggcactcgtatgggtgggctgatcgaacagatgacagagcacataactgttggtggattccaccttatgcacaaaaccttgctcaagcagaaaatccagcgcgcgataaaccgttggcggcttggcttgcggttcagcttcgcgcagtaaatcaagcagatcataagcgctgatagcgccatcctgcagactcatcaggcgcaacacttccaggcgctgtggggtcaggcgcacattacgctgcgcgcagattttttcagcctgcgctaataactcctgcgttgtggtcttttccatcgggcacctcaaagtgggggttaagaatgtccttactttaccatgttccaggaaaaacaccgagaacccttattgttgccgtaatgttgattttctgctttgtaggtaaggtgttatgttgccttgtcgtaccattatcaacacgataataattaataattcatttttaaataaattgcttcaagttaactcgctatttatttaactgggtttaaacgcatacctgtagttcagaaattatgagcgatttttgatagtgaccagatggcaaaagaattataaggaggacacggtacgacaaaaaaggtagatgaatcatgttgaagataatacccggtgcaactggatactttaataaaacactcaatagtaatcaattcgataatgaagatgcaatcaaagataaattagataatagaggtagtatcaaaggtaaattaaataatatatatggtaaatctattgattatgcagcgctgcgtcatcgggatataattattgcaaaaatagatttgtttattcaacgaatcacgcataatttatggcatgcacgtaaaaaaatgtgtttttaattgtgcaaataaatgatctcaaaatgtgggtcaataagtatattgacgattgcactgatgaggatttaaacgatcgtgactttattgcaagtgttgttgaccgggctatttttcatttcgcgattaatagtatatgtaatcctggggataataaagatgcaatgcccattgaacaatgtacttttgatgtagaaactaagaatgaccttccctccacggttcagctattttatgaggaatctaaggataatgaacctttagcgaatatacattttcaagcaataggttctggttttttaacgtttgttaatgcctgccaggaacatgatgacaacagcttaaaattatttgctagcctgttaattagtcttagttattctagtgcctacgcagatttaagtgaaacagtgtatattaatgaaaataatgagagctacctgaaagctcagtttgaaaaattatctcaacgtgatatgaagaagtacctgggagagatgaagcgtctggctgatgggggagaaatgaattttgatggctatctggataagatgagtcatctggtgaatgaaggaacgctcgatcctgatattttaagcaaaatgcgagatgctgcaccacaattaattagcttcgcgaagagctttgacccaaccagtaaggaagagattaaaatacttacagacacttctaaattaatttatgatttgttcggggttaaaagcgagaaataatatgtgaagttcttcgatagtatggaaggcattatataaaaggacccaatatttattgggttcttttttctctatcaatactattagcagggagatatatcaccagagtttaatgtgtgattttttatttatcgtcgaacctggattgtttatcattggccttaacaaagttaacggctaataagattatttccatcacttcgtgagagcttcatgccttgagaggatctcaattttcttttgcaatgagacaggcgcttcctgttgttatggtatagtaccccgctattgagcctcctgaatagtgatgctgaataacataaccccatgatatatcgataaaataatctctacatttgaaaatgcacggtaattctgaaatgcaaaaaatcaaccaaaccagcgcaatgcctgaaaaaactgacgttcactggagtggtcggtttagcgttgcaccaatgctcgactggacggacagacattgccgctatttcttgcgtctgctttcccgcaatacgttgctgtataccgaaatggtgaccacaggggcgattattcacggtaaaggtgattatctggcgtacagtgaagaagaacatccggtagcgttgcaactgggcggtagcgatccggcggcgctggcgcagtgtgcaaagctggcagaagcgcgcggatatgatgagatcaacctgaatgtcggctgcccgtctgaccgggtgcagaacggcatgtttggtgcgtgtctgatgggtaatgcgcagctggttgccgactgcgtgaaagcgatgcgcgatgtggtgagcattccggtgacggtgaaaacgcgtattggcatcgacgaccaggacagctatgaatttctctgcgatttcatcaataccgtttccggcaaaggcgagtgtgagatgttcatcatccacgcacgtaaagcctggcttagcgggttaagcccgaaagaaaaccgtgaaatcccgccgctcgattatccgcgtgtgtatcaactgaagcgtgactttccgcatctgacaatgagcattaacggtggtatcaagagcctggaagaggccaaagcacacctgcaacatatggatggcgtgatggtcgggcgcgaggcgtatcagaatccgggtattctggcggcggtagaccgggagatctttggttccagcgataccgatgccgatccggtggcggtagtgcgcgccatgtatccgtacattgagcgtgaactcagccaggggacgtatctcggccatattacccggcatatgttgggcttgttccagggtattcctggcgcgcggcagtggcggcgttatttaagtgaaaatgcccataaagcgggtgcagacattaatgtgctggaacacgcgctcaaactggtggcggataagcgttaacttttcaccaaaaagtagtcaaattcaccacgccctgcgcaccgtcgcggggcgttttgctgttaaatcaatagattatttttggcatgattcttgtaatgccagcaagagatttcatatttgggagagcatcatgctggaactactttttgtgattggcttttttgtcatgctgatggtcaccggcgttagcttgctgggcattatcgccgcgctggttgtggcgacggccattatgttcctcggcggtatgctggcattgatgattaagttgctgccgtggttactactggcgattgcggtggtgtgggttattaaggcgattaaagcaccaaaagtgccgaaatatcagcgttatgaccgctggcgttactaagggattgtgcggatgatcacaacctaaggttttatccttagaacaaaataggaattaataatcaaatctgtcactattgcgcctctaacagattcatcgtgctgtaccctacatacagccgaactataaaaagaaagggcttcccaggtggaagccctatttcttttatggaatcagcaggctggaaccttgcgtcgcccggctttccagaatctcatgcgcacgctgcgcatccttcagcggatatttctgctgctcggcgacatcgaccttaatcacaccgctggcaatcaaagagaacagttcattactggcctcggttaattcctcccgcgtggtgatatagccttgcagggaagggcgtgtcacatacaagctgcctttttgattgagaatgcctaagttcacaccggtaaccgcaccactactgttgccaaaactgaccattaagccgcggcgttgcaggcaatccaggctccgttcccaggtgtctctgcccacggaatcgtacaccacgcgcactttcttaccgccggtgatctcttttaaccgctcgaccagatcctcttcacgatagttaataacctgccacgcgcccgcttttagcgcgctctgcgctttttgcgcggttcctacggtgccgataagtttcgcgcccagggcttttgcccactggcaggcaattaagccaacgccgccagccgctgcgtggaacaggaactgttcatcgggtttaatttcataggttttgcgcagcagataataaaccgttaagcctttcaggaaggatgccgcagcttgctcaaaagaaattgccgcaggcagaatcgccgctttatccgcaataatgttatgcacagagctgtaagcgcctaacgcgctctgcgcatagactacacgatcgcctgccttaatatgctttacaccactgccgactttactcacgatgcctgctgcttcggtgcctaatccgctgggtaggcttggcggcgggtaaaggccgctgcggatatatgtgtcgataaaattgatgccgatggctttattttcgacctggatttcattctccgccggatcggcaggagtgaactctacggcttgaagtacttccgggccaccgtgcttgtgaaattcaattcgtgttgccatgtgtcctccagaacgtatcgtcagggtctgcttcatatgataaagtttcgacccattctttatctcggtaactccattcactatggcaggaaataaacccttcaacaaacagcaggctgaaccccgcgaacgcgatccacaagttgccgggctgaaagtgcctccgcacagcatcgaagcggagcagagcgtgttgggcggtttaatgctagataacgaacgctgggatgatgtagccgagcgtgtggtagcagacgatttttacacccgcccacaccgtcatatctttactgaaatggcgcgtttgcaggaaagcggtagccctatcgatctgattactcttgcggaaagcctggaacgccaggggcaactcgatagcgtcggtggttttgcttatctggcagagctgagtaaaaatacgccaagtgcggctaacatcagtgcctatgcggacatcgtgcgtgaacgtgccgttgtccgtgagatgatcagcgttgcgaatgagattgccgaagctggttttgatccgcaggggcgtaccagcgaagatctgctggatctggctgaatcccgcgtctttaaaattgccgaaagtcgtgcgaacaaagacgaagggccgaagaacatcgccgatgtgctcgacacaaccgtggcgcgtattgagcagttgtttcagcagccacacgatggcgttaccggggtaaacaccggttatgacgatctcaacaaaaaaaccgctggcttgcagccgagcgatttgatcatcgtcgccgcgcgtccgagcatgggtaaaacaacatttgcgatgaacctcgtcgaaaacgcggcgatgttgcaggataaaccggtacttatcttcagcctggagatgccaagtgaacagatcatgatgcgttctctggcgagcctgagccgcgttgaccagactaaaatccgtaccgggcagctcgatgacgaagactgggcgcgcatttccggcaccatgggtattttgctcgaaaaacgcaatatctatatcgatgactcctccggcctgacgccaacggaagtgcgttcccgcgcacgccgtattgcccgtgaacacggcggcatcgggcttatcatgatcgactacctgcaactgatgcgcgtaccggcgctttccgataaccgtacgctggaaattgcagaaatctctcgcagcctgaaagcactggcgaaagaactgaacgtgccggtggtggcgctgtcccagttgaaccgttctctggaacaacgtgccgacaaacgcccggtcaactccgacctgcgtgaatctggctctatcgagcaggatgcggacttgatcatgtttatctatcgtgatgaggtgtatcacgaaaacagtgatttaaaaggcatcgcggaaattattatcggtaaacaacgtaacggcccaatcgggacggtacgcctgacctttaacggtcaatggagccgcttcgacaactatgcggggccgcagtacgacgacgaataataattattttatgaattaggtaattaaagcaaacacttatcaaggaacacaaatgcaagcggcaactgttgtgattaaccgccgcgctctgcgacacaacctgcaacgtcttcgtgaactggcccctgccagtaaaatggttgcggtggtgaaagcgaacgcttatggtcacggtcttcttgagaccgcgcgaacgctccccgatgctgacgcctttggcgtagcccgtctcgaagaagctctgcgactgcgtgcggggggaatcaccaaacctgtactgttactcgaaggcttttttgatgccagagatctgccgacgatttctgcgcaacattttcataccgccgtgcataacgaagaacagctggctgcgctggaagaggctagcctggacgagccggttaccgtctggatgaaactcgataccggtatgcaccgtctgggcgtaaggccggaacaggctgaggcgttttatcatcgcctgacccagtgcaaaaacgttcgtcagccggtgaatatcgtcagccattttgcgcgcgcggatgaaccaaaatgtggcgcaaccgagaaacaactcgctatctttaataccttttgcgaaggcaaacctggtcaacgttccattgccgcgagcggtggcattctgctgtggccacagagccattttgactgggtgcgcccgggcatcattctttatggcgtcagcccgctggaagatcgctccaccggtgccgattttggctgtcagccagtgatgagtctaacctccagcctgattgccgtgcgtgagcataaagccggagagcctgttggttatggtggaacctgggtaagcgaacgtgatacccgtcttggcgtagtcgcgatgggctatggcgatggttatccgcgcgccgcgccgtccggtacgccagtgctggtgaacggtcgcgaagtaccgattgtcgggcgcgtggcgatggatatgatctgcgtagacttaggtccacaggcgcaggacaaagccggggatccggtcattttatggggcgaaggtttgcccgtagaacgtatcgctgaaatgacgaaagtaagcgcttacgaacttattacgcgcctgactagtagggtcgcgatgaaatacgtggattaatcgttctgtaatatttgattgtctgtgccggatgcggcgtgaatgccttatccggccaataaaatcctaaaaattcaataagttgatgttctttcatgctcttataaaggtcgtgcctctggcggatgtacgtttgtcatgagtctcactctgttgctaattgccgttcgctcctgaacatccactcgatcttcgccttcttccggtttattgtgttttaaccacctgcccgtaaacctggagaaccatcgcgtgtttcaaaaagttgacgcctacgctggcgacccgattcttacgcttatggagcgttttaaagaagaccctcgcagcgacaaagtgaatttaagtatcggtctgtactacaacgaagacggaattattccacaactgcaagccgtggcggaggcggaagcgcgcctgaatgcgcagcctcatggcgctagcctttatttaccgatggaagggcttaactgctatcgccatgccattgcgccgctgctgtttggtgcggaccatccggtactgaaacaacagcgcgtagcaaccattcaaacccttggcggctccggggcattgaaagtgggcgcggatttcctgaaacgctacttcccggaaagtggcgtctgggtcagcgatcctacctgggaaaaccacgtagcaatattcgccggggctggattcgaagtgagtacttacccctggtatgacgaagcgactaacggcgtgcgctttaatgacctgttggcgacgctgaaaacattacctgcccgcagtattgtgttgctgcatccatgttgccacaacccaacgggtgccgatctcactaatgatcagtgggatgcggtgattgaaattctcaaagcccgcgagcttattccattcctcgatattgcctatcaaggatttggtgccggtatggaagaggatgcctacgctattcgcgccattgccagcgctggattacccgctctggtgagcaatagcttcagcaaaattttctccctttacggcgagcgcgtcggcggactttctgttatgtgtgaagatgccgaagccgctggccgcgtactggggcaattgaaagcaacagttcgccgcaactactccagcccgccgaattttggtgcgcaggtggtggctgcagtgctgaatgacgaggcattgaaagccagctggctggcggaagtagaagagatgcgtactcgcattctggcaatgcgtcaggaattggtgaaggtattaagcacagagatgccagaacgcaatttcgattatctgcttaatcagcgcggcatgttcagttataccggtttaagtgccgctcaggttgaccgactacgtgaagaatttggtgtctatctcatcgccagcggtcgcatgtgtgtcgccgggttaaatacggcaaatgtacaacgtgtggcaaaggcgtttgctgcggtgatgtaatgcaggaaagcaggctggagctacccagcctgcagtgaaattaaactgtcgtcgctttcactctttctttatagatgatttttttgatgccatcgttctacgtgagagataataaacgttgttagttcttttattgttaagcttatcccaattatctggaattccttatcctgtttttttgggtggagtaataatttctgcacatctaaccattattaaatttaataataagtatcgggtttgttacgatagaatatttctatatcctcaagaatatgctttgccttattgcctgtgactttctgagattcaattatagtatcgttaaattctaatgttaaagagaactcttttttccgctttgtgtaagtttaaccttatattgattaccaatatcaaataaaaaggtcctgtaatgagaataatcacctttaacctcctcggcaaaacagcaaagcgtgcaaatatacataaagtctttcttacccctgattttgttaactaaatcaataaatgcgtgaaaaactttacttgcaatagaacttgatacttcttctccaggtctaaaaaatcttttgcaatttttaactgtgtttctatgtataaaaagaaatctttggcataagagatatctttattatttagtgcatctagctcaacaggtaaagatgtcgttttgttgctattcacatatgatatattcatatcatcatctccatcgcgagtaataaaattaatcaccattgtagggtagggggctggtcaatcagaaatcatctttataaacttcgattgtttttgtaatgctgtatcattaagttcattaaatcgtacagcagataaatgttctatcaaatttcgctcatttgccgaggattcatcataataaacgtaaaattaatgtatccttacatcgagtaataaacattttttatacaaaaaaagacaggaacgtatttactgggttaaatataatcatcctgcttttcatcacaaaaaccgcagataatccttcctttccccggcagctggcgttatggtcagatggtttttgcaacaaatctcacaataaaaagtttcaacatactgactatttagggaaaaatatgcgcaagatcacacaggcaatcagtgccgtttgcttattgttcgctctaaacagttccgctgttgccctggccagttctcctagtccgcttaaccctgggactaacgttgccaggcttgctgaacaggcacccattcattgggttagcgtcgcacaaattgaaaatagcctcgcagggcgtccgccaatggcggtggggtttgatatcgatgacacggtacttttttccagtccgggcttctggcgcggcaaaaaaaccttcagcccagaaagcgaagattatctgaaaaatcctgtgttctgggaaaaaatgaacaatggctgggatgaattcagcattccaaaagaggtcgctcgccagctgattgatatgcatgtacgccgcggtgacgcgatcttctttgtgactggtcgtagcccgacgaaaacagaaacggttagtaaaacgctggcggataattttcatattcctgccaccaacatgaatccggtgatctttgcgggcgataaaccagggcaaaatacaaaaagccaatggctgcaggataaaaatatccgaattttttatggcgattctgataatgatattaccgccgcacgcgatgtcggcgctcgtggtatccgcattctgcgcgcctccaactctacctacaaacccttgccacaagcgggtgcgtttggtgaagaggtgatcgtcaatagtgaatactgacagagcgggagagcgtgatgctctcccgaatgctgtttttttaatcacacctttatcctttcgctgtcttgctgcaaactgattaagagagttttatcaaggagcagcacatgtggtatcaaaagacgctcacgcttagcgccaaatctcgtgggtttcatctggtaacggatgaaattctgaatcagctggctgatatgccgcgcgttaacatcggcttactgcatctgttgctgcaacatacctccgcctctctgacacttaatgagaactgcgatcccaccgtacgccacgacatggagcgttttttcctccgcaccgttcccgacaacggaaattatgagcatgactatgagggagcagacgatatgccttctcatatcaaatccagtatgctgggaacaagccttgtattgccggtgcataaagggcgtattcagaccggcacctggcaaggcatttggctgggggaacatcgcatccacggcggaagccgtcgcatcatcgcgacactacaaggggagtaaaaaatgaccattagcgagttgctacaatattgcatggcaaaaccaggcgcagaacagagcgtgcataatgactggaaagcgacgcagatcaaagtggaagatgtactgtttgcgatggtgaaagaagtagaaaatcgcccagctgttagcctgaaaaccagcccggagctggcggagctgctacgtcagcagcacagcgatgtgcgtccaagccgccatctgaataaagcgcactggagcaccgtgtatctcgacggtagcctgccagatagccaaatctattatctggtggatgcgtcttatcagcaggcggtgaatttactgccggaagaaaaacgtaaattgctggtgcaactctgaaaggaaaaggccgctcagaaagcggccttaacgattacagcatcggcttaaggaagcgtgccgtgtgacttgcttcgcactccgcgacggtttctggcgtaccggagacgaggatctcgccgccaccactgccgccttctggtcccaggtcgacaatccagtcagcggttttgatcacgtcgagattgtgctcaatcaccacaatggtgttgccctgatcgcgcagtttatgcagtacgtcgagcagttgctgaatatcggcgaagtgcagaccggtggtcggctcgtcgagaatatacagcgtctgcccggtgccgcgtttactcagttcacgcgccagcttcacgcgctgggcttcaccgccactaagggtggttgcggactgccccagtcgaatgtacgtcaggccaacgtccatcaacgtttgcagcttacgcgccagtgcaggtacggcatcaaagaactcacgcgcctcttcgatggtcatatccagcacttcgtggatggttttgcctttgtacttaatctccagcgtttcacggttatagcgtttacctttgcactggtcgcacggcacgtagatatccggcaggaagtgcatctccactttgatcacgccatcgccctgacaggcctcgcagcgtccgccacgaacgttaaagctgaaacgtcccggcgtatagccgcgcgcacgggattccggtacgcccgcaaacagttcgcgcacaggcgtaaacacgccggtataggtcgccgggttagaacgtggagtacgaccaattgggctttggtcgatatcgatcactttatcgaaatgctccagcccctgaatatcgcgatacggtgctggttcggcgatggtcgccccattcaactggcgttgggcaatcgggaacagtgtgtcgttaatcagcgtgcttttaccggaaccactaaccccggtgatgcaggtaaacagacccaccggcagcgtcagcgtcacgtccttcaggttgttgccgcgtgcgcctgtcagcttcagcactttttccggattcgccggaacgcgtttcttcggcacttcaatcttgcgtttgccgctcatgtactgcccggtcaagctctccggcaccgccataatcgcttccagcggaccttctgcgaccacttcaccgccgtgaacacctgcgcccgggccaatgtcgatcacatggtcagcggcgcgaattgcgtcttcgtcgtgctccaccacaatcacggtattaccgagatcgcgcagatggataagcgtacccaacaggcgctcgttatcacgctggtgcaggccgatagacggctcgtccagcacgtacataacgccaaccaggcccgcaccaatctggctcgccagacggatacgctgtgcttcaccgccagaaagcgtttctgcgctgcgggaaagcgtcaggtaattcaggccgacgttaacgaggaatttcagacgatcgccgatctctttaaggattttttctgcaatcttcgcccgctgacctgcgagtttgagattgttgaagaattccatcgcatgaccaatgctcatgtcggagatagcaggcagcggcgtattctcgacatacacgtggcgcgcttcccgacgcagacgcgtcccttcgcagctggcgcacggacgattactgataaacttggctaattcttcgcgtaccgcgctggattccgtctctttatagcggcgctccatattatgcagcacgccttcgaacggatgacgacgaatggaggtatcgccacgatcgttcatgtatttgaattcaatgttttctttgccagaaccgtacaacaccactttatgcacgttcgcgctcaggctgccccacggcgcttcgacgtcgaacttatagtgatctgccaggcttttcagcatctggaaataatagaagttgcggcgatcccagccacggatcgcaccaccagccaggctcagttccggattctggatcactcgatcaggatcgaaatattgctgtacgccaaggccgtcgcaggtcgggcaggcccccgccgggttgttaaagctaaacagtcgcggctccagttcacgcatactgtagccgcaaattgggcaggcgaagttggcggagaacagcagctcttccgctttcgggtcgtccatatccgccactaccgcggtaccaccggaaagctccagcgcggtttcaaaactctcggcaagacgttgggtaagatcgtcacgcaccttgaagcgatcaaccaccacttcaatggtatgtttcttttgcagttccagttttggcggatcggaaagatcgcagacttcgccatcaatacgagcacggatgtagccctggcttgccaggttctccagcgttttggtgtgttcgcctttgcgctctttaatgattggcgcgagtagcatcagacgcttgccttccggctggctcagcacgttatccaccatctggctgacggtttgcgccgccagcgggacgtcgtggtccggacagcgcggctcgccaacgcgggcgaataacaaacgcaaatagtcgtggatttcggtgattgtccccaccgtagaacgcgggttatgagacgtgcttttctgctcaatactgatggcaggagaaagcccctcaatatgatcgacgtccggcttttccatcagactcagaaactgccgcgcgtaggcggaaagggattcaacgtaacggcgctgcccttcggcatataaggtgtcgaaagcgaggctggatttgccagaaccgctaagcccggtcacgacaatgagcttgtcgcgggggataacgaggttgatgtttttgagattatgggtgcgggcgccccgaacttcgatcttatccattcacctttcccggattaaacgcttttttgcccggtggcatggtgctaccggcgatcacaaacggttaattatgacacaaattgacctgaatgaatatacagtattggaatgcattacccggagtgttgtgtaacaatgtctggccaggtttgtttcccggaaccgaggtcacaacatagtaaaagcgctattggtaatggtacaatcgcgcgtttacacttattcagaacgatttttttcaggagacacgaacatggccagcagaggcgtaaacaaggttattctcgttggtaatctgggtcaggacccggaagtacgctacatgccaaatggtggcgcagttgccaacattacgctggctacttccgaatcctggcgtgataaagcgaccggcgagatgaaagaacagactgaatggcaccgcgttgtgctgttcggcaaactggcagaagtggcgagcgaatatctgcgtaaaggttctcaggtttatatcgaaggtcagctgcgtacccgtaaatggaccgatcaatccggtcaggatcgctacaccacagaagtcgtggtgaacgttggcggcaccatgcagatgctgggtggtcgtcagggtggtggcgctccggcaggtggcaatatcggtggtggtcagccgcagggcggttggggtcagcctcagcagccgcagggtggcaatcagttcagcggcggcgcgcagtctcgcccgcagcagtccgctccggcagcgccgtctaacgagccgccgatggactttgatgatgacattccgttctgatttgtcattaaaacaataggttatattgttttaaggtggatgattaaagcatctgccagccataaaaaagaagcctccgttatggaggcttctacgtatcaggtcaaaatcattggccattgtggcggtgtctgattcatctcttctatcatcacgctctcgatgttgtgccagatagcggtgatgtccgccattgtgatgccaagcaaccccattgcgaaccaacaggcggaaacaacgcccagaccgctgctgatcaccgcaagcccgacataatcagaccgacgaaaacggatgttgagtgtgctggccagaaacatcattacggcactaagaagttgccagcgaagaagaaccacgccagtggtgagggtagccatcaaacaattcctctgaaaagagccgatgccctggacagcgcggcgttgttcacgggaggcgtggtacactctggctatcgcggggcttgcagaacacaaaaatgaaacactctgtttgtttcattaattttgtgaactatatcacaattgattgtttgttagccatattaggccgtgacttttattgctgtacagattatgtggtttttcagtggcattaagggcatatcttcccgccgcctctgcattcctgtaggaaattaattttgaatatcaatgaattattttcatccaggtgacgattagaaaggtatcaatttcaaatcaggcaaaagtgctatttataccgtaagatttatctaaagacgtcggtacccagggttttcaccttgcaatggccgggtataaacaggcaggaaattgatagcaatgagtcatcgtgcacgacaccaattactggcgttgccgggcattatctttttagttctctttcccatcattcttagcctatggattgccttcctttgggcaaaaagtgaagtgaataatcagctccgaacctttgctcaactggcactggataaatccgagctggtcattcgccaggcagatttagtgagcgatgcagctgaacgctatcaggggcaagtttgcactccagcccatcaaaagcgaatgttgaatattattcgtggctatctttatattaatgaattgatctatgcccgtgataaccattttttatgcagtagcctgatagcgcctgtaaacggctatacgattgcaccggccgattataagcgtgaacctaacgtttctatctattattaccgcgatacgccttttttctctggctataaaatgacctatatgcagcggggaaattatgtggcggttatcaaccctctcttctggagtgaagtgatgtctgatgacccgacattgcaatggggtgtgtatgatacggtgacgaaaacctttttcagcttaagcaaagaggccagcgcagcaacgttttctccgctgattcatttgaaggatttaaccgtacaaagaaatggctatttatatgcgacagtttatagcacaaaacgcccaattgcagccattgttgcgactagttatcaacgtcttataacccatttttataatcatcttatttttgcgttgcccgccggtattttggggagtcttgttctgctattactctggctacgtattcgacaaaactatttatctcccaaacgtaaattgcaacgcgccctcgaaaaacatcaactttgtctttattaccagccaataatcgatatcaaaacagaaaaatgtatcggcgctgaagcgttgttacgttggcctggtgagcaggggcaaataatgaatccggcagagtttattccgctggcagaaaaggaggggatgatagaacagataactgattatgttattgataatgtcttccgcgatctgggcgattacctggcaacacatgcagatcgctatgtttctattaacctgagcgcctccgattttcatacgagtcggttgatagcgcgaatcaatcagaaaacagagcaatacgcggtgcgtccgcagcaaattaaatttgaagtgactgagcatgcatttcttgatgttgacaaaatgacgccgattattctggctttccgccaggcaggttacgaagtggcaattgatgattttggtattggctactctaacttgcataaccttaaaagtttgaatgtcgatattttgaaaatcgacaaaagctttgttgaaacgctgaccacccacaaaaccagtcatttgattgcggaacacatcatcgagctggcgcacagcctggggttaaaaacgatcgctgaaggcgtcgaaactgaggagcaggttaactggctgcgcaaacgcggcgtgcgctattgccagggatggttctttgcgaaggcgatgccgccgcaggtgtttatgcaatggatggagcaattacccgcgcgggagttaacgcgcgggcaataaaattacaggcggtggcgataatcgctgggagtgcgatcaaactgccgacggaaaacgcgggagaaggtctgctggctgacataacccaggtccattgcgatatcaaaaatcggacgctcggtggtgcgcaactcaacggcggccagtaacaggcggcgttggcgaatgtaatcgccaagcgtctgatgcgtcaccgtgcggaacattcgttgcaagtaccacttactatagccacttttttttgcgactacatcaatgttaagcggctggtcaatatgctcgtcaatccatgcgataagatcctgaataattttctgatgggacataaatctgcctcttttcagtgttcagttcgttaattcatctgttggggagtataattcctcaagttaacttgaggtaaagcgatttatggaaaagaaattaccccgcattaaagcgctgctaacccccggcgaagtggcgaaacgcagcggtgtggcggtaagcgcgctgcatttctatgaaagtaaagggttgattaccagtatccgtaacagcggcaatcagcggcgatataaacgtgatgtgttgcgatatgttgcaattatcaaaattgctcagcgtattggcattccgctggcgaccattggtgaagcgtttggcgtgttgcccgaagggcatacgttaagtgcgaaagagtggaaacagcttagctcccaatggcgagaagagttggatcggcgcattcataccttagtggcgctgcgtgacgaactggacggatgtattggttgtggctgccttagccgcagtgattgcccgttgcgtaacccgggcgaccgcttaggagaagaaggtaccggcgcacgcttgctggaagatgaacaaaactaaagcgccacaagggcgctttagtttgttttccggtctttgtctttctctctatcccgctggtacacaggagggtttcccccgacgtcaacacacctcattcgagcacgtggtggaggttccggttggtgttgatgctttaattgtatgtcaccgacgtttcttcgccagtgtaaaagtatactttttaaccgcaatatttttgtcatctcagacgattttttatcgcaatcctgaacggtatacggctcgataacgctgcaatcttgcgcaccgacgataacgtttgcgcatcaattgcctggtttttcatcgtcaagacaataaaagagaaaaaagcagcaaacttcggttgaaaaagccgctatgatcgccggataatcgtttgctttttttaccacccgttttgtatgcgcggagctaaacgtttgcttttttgcgacgcagcaaattgtcgcaaacctggagcaggaagataacgtttcgctggcaggggattgtccgccacgcatcttgacgaaaattaaactctcaggggatgttttcttatgtctacgccaagtgcgcgtaccggcggtagtctcgacgcctggtttaaaattagtcaacgtggaagcactgtccgtcaggaagtggttgccgggttaacaacgtttctggcgatggtctacagcgtcatcgtcgttccaggtatgttgggtaaagcaggcttcccgcctgcggcagttttcgttgcaacctgtctggttgccggactcggttctatcgtgatgggtctgtgggctaatctgccgttggcgattggttgcgccatctccctgacagcgtttaccgcattcagcctggtgctggggcaacatattagcgtacctgtcgcgctgggtgccgtgttcctgatgggtgtgctgtttacggtaatttctgccacgggtatccgtagctggattttgcgcaacttgcctcacggtgtggcgcacggcacggggattggtatcggtctgttcctgctgctcattgccgctaacggtgtcggtctggtgattaaaaacccgcttgatggtctgcccgttgcgctgggtgatttcgcgaccttcccggtgattatgagtctggtaggtctggcggtgatcatcggcctggaaaaactgaaagtccctggtggcattctgctgaccattatcggtatcagtattgtcggtttgatcttcgatcctaacgtccatttctccggcgttttcgccatgcctagtttgagcgatgaaaacggcaatagtctgattggcagcctggacattatgggcgcgctgaatcctgtagtcctgccaagcgttctggcgctggtgatgacggcagtatttgatgccaccggaactatccgtgccgtcgccggccaggcgaacctgctggataaagatgggcagatcatcgacggtgggaaagcactgaccactgactccatgagcagcgttttctctggcctggtgggtgcggctccggcagcggtatacatcgagtctgcggcgggtacggcggcgggcggtaaaaccggtttgacggctatcaccgttggcgtgctgttcctcctgattctgttcctctctccgctctcttacctcgttccggggtatgcaacggctccggcgctgatgtacgttggcctgctgatgctgagcaacgtggcgaaaatcgactttgctgattttgttgatgcgatggcgggtctggttacggctgtattcatcgtgctgacctgtaacatcgtaacaggcatcatgatcggcttcgcgactctggtgattggtcgtctggtttccggcgaatggcgcaagttgaacatcggtacggtcgttatcgccgtggcgctggtgaccttctatgcgggtggctgggctatctaatctttcatcggattctgaaaacgggtggcaatggctgcccgtttttattttctccgcacattgtgtgagcttttgcgatattctgaaaaaaatgagaattcaggcataacgtctttctcagatcataaaaaacatcgcaaacagggaacgcatggaaatcttcttcaccatactgataatgaccctcgtggtcagcctgtccggggtggtcactcgtgtcatgccctttcagatcccgcttccgcttatgcaaatcgccatcggtgcgctactggcgtggccgacgtttggtttgcatgtggagtttgatcctgaactctttttagtcttgtttatcccgccgttgctgttcgctgatggctggaaaacgccgacccgtgaatttctcgaacatggtcgagagattttcggcctcgcgctggcgctggtggtggtcaccgtggtcggcattggcttccttatttactgggtggtgccgggcattccgctgatccctgcctttgcgctggcggcggtgctttctccgaccgatgctgtggcgctctccgggattgttggcgaagggcgcatcccgaaaaaaatcatgggcattttgcagggcgaagcgttgatgaatgacgcctccggtctggtgagcttgaagtttgccgtagcagtggcgatggggacgatgatcttcaccgtcggcggtgcgacggtcgaatttatgaaagtagccattggcggtattctcgccggttttgtggtgagctggctgtacggtcgcagcctgcgattcctcagccgctggggcggtgatgaacccgcgacgcagatcgtcctgctgttcctgctgccattcgcttcttatctgattgccgaacatattggcgtttccggcatcctcgctgcggttgccgccgggatgaccatcacccgctccggtgtgatgcgccgtgcgccgctggcaatgcgcctgcgtgcaaacagcacctgggcgatgctggaatttgtctttaacggcatggtgttcctgctgttaggtctgcagctgccgggtattctggagacgagcctgatggcagcagaaatcgaccctaacgtcgaaatctggatgctgtttaccaatattattctgatatatgcggcgctgatgctggtccgtttcggctggctgtggacgatgaaaaagttcagcaaccgcttcctgaagaagaagccgatggagtttggtagctggaccacacgagaaatcctgatcgcgtctttcgccggggtgcgtggggcgatcactctggccggtgtgctctctatcccgctgctcttgccggatggtaacgtcttcccggcgcgctatgagctggtgttcctggcggctggcgtcattctcttcagcctgtttgtcggcgtggtgatgttgcctattctgctacaacacattgaagtcgcggatcatagccaacaattgaaagaggaacgtattgcgcgagcggcaacggcagaagtggcgattgtggcgatccagaaaatggaggagcgtctggcggcggataccgaagagaatatcgataaccagctgcttacggaggtcagttctcgcgtcattggtaacctgcgtcgtcgcgccgatggacgtaacgacgttgaaagttccgtgcaggaagagaaccttgagcgtcgcttccgtctggcggcattgcgttctgaacgtgctgaactttaccacctgcgcgccacacgggagatcagcaacgaaacgctgcaaaaattactgcacgatctcgatttgcttgaagcgttgctaattgaggaaaatcagtaagccgaaagcgacgtaaccaggcccgaggtaatctgaaaaaggtgcaatcttttgcacctttaacaggttagctcgggctaacattcatgattctaaaacaaataaattatctctcttttaaagtcaattcattggctgttcttcgacttaacctcaatctgcatcttgcataatatctgcagtaatcttcatagcgactgcatgaagattatcctcagtttgactcatgccagtatgagtggcacaatcttcttcaaagaatttctgtagtgttaccaggatatcactattaatggagatattttcctcaccacggagaatggtaatacccattccctggacgctagcctcatcgaaattaacacgatagagacggatattaaacatccaggcttttgttaaaacagaacagttgaaatggcaattgcttaaattggcattattaaaattaacattagccatattagagtcggtacatataaccatttcgaggaacgtatttgttaaccgcgtaaaaaagagtttgctatcaattaagtttatattctggagggttgctttattcaggttgacacgagacagatcagcatgttcaaagttaattaaatcaagtttagagaagctaaggtcggctctaaataaattaatatatggcgctattactttataaagatttacctcagccatgtatgccatataaaaattactataatcaaggaaggtatttttaatattggctctattcattgttgcattgtagaattgaacatgcatagcggaacaactatttagagttccgtcagtcatttttatctgagcgaaattactgtcatcgagaatacaattatcaaaaagtattttttccattatggcgaaattaaaattcgttttatacatattacagtcctgaaaaatagcgttttgtagtctgcaacctgcaaaattgctattggataaatcttcatctttaatcacgatacctttcaggctaaggtgactaaaatcgtaaccaccatttactgtctgtgggatttcgatagtattattatggacggtgacattatttataaaatataccaccttaatactcacttccttatctttattaaggtaaactcttctcgtaattctatcgtcacatttattatttgcatgactagctatatctataaaatatttatgtattttcctgtccgtttctttcgtgatttttccacttggtaaactatcataaattcttttcattttctgaatcaagcctatcactttttcatgatcatccattttgaaaagagagagggctttattgtcaattaacgtgtttttatgatgtttgctgtaattatcactttttgttttctttgtatgacttggacttgtgacagagtggttatcgttaatcaggcaaagagggaaaaacatattatttaaaccattatagcgcataaaatatccttataattaacaagaaagaaaaggcatattctctgcattatcattttctacgactgtcaaaaatcgctcattttttaatgagtttatttgtttaatattatgggaaaaggtgatgcatttgggagaggaagagtattccccggtcagacgaccggggaaggggagagattaatgcgcgcggccttgctcaacgccaaagccggtctgggagcggataaactgcgcgcggaacagttcacgctcacgcgcgccttccgcactgttatcggttgcgctgaagaaccagatgccgaggaatgccacggtgatagagaacagcgccgggtattcatacgggaagatggctttttcgtgaccaaggatctgtacccaaatcgtcgggccgaggatcatcagtactactgcggtaatcagccccagccagccacccatcatcgcgccacgcgtggtcagtttgctccagtacatagaaagcagaatgatcgggaagttacagctcgccgcgatggcaaacgccagccccaccataaaggcgatgttctgattctcaaacagcacgccgaggataatcgcaatcacgccgaggatcagtacggtgattttacttacccgcagctcttcacgttcggtcgcgccttttttgaagacgttagcgtacaagtcatggctaaccgcggatgcgcccgccagcgtcagacccgcaaccaccgcgaggatagtggcgaaagcaaccgcactaataaaaccgaggaacaggttgccgcccactgcattcgccaggtgaacggccgccatgttgttaccaccaatcagatggcccgccgcgtctttatattccggattcgcaccaaccagcatgatcgcgccgaagccgataataaaggtcagaatatagaagtagcccataaacccggtggcgtagaacacgctcttacgtgcttcgcgggcatcgctgactgtaaagaagcgcatcagaatgtgcggcaagcccgccgtaccaaacatcagtcccagacccagagagagcgcggagatcggatctttcaccagcccgcccggcttcatgatgtcgacacctttcgggtgtaccgccatcgcttcactgaacagattgttgaagctaaagccgacgtgtttcatcaccataaaggccataaagctggcaccgaacagcaacagcacggctttgataatttgcacccaggtggtcgccagcatgccgccgaacaggacgtacatcatcatcagcacgccgaccagcaccaccgcaatgtgatagttaaggccaaacagcagctcgatcagtttacctgcgcccaccatctgggcgataaggtaaagcgccaccaccaccagagaaccacaggcgctaagaatacgaatcggcccttgtttcagacggtaagaggccacatcggcaaaggtgtagcgccccaggttacgcagacgttcggcaatcaggaacaaaatgatcggccagcccaccaggaagcccaggctgtaaattaagccgtcatagccggaggtaaacaccagcgcggagatccccaagaaactggcggcggacatatagtccccggcaatcgccagcccgttctggaagccagtgatattgccgcctgcggtgtagtagtcgctacgagaacgtacgcgtttacttgcccagtaggtaatgccgagcgtaaacacgacgaaaatcaggaacataataatcgcctgccagttcgttggctggcgctctacggccccgctaatagcatccgcggcgttagctgcgaaagggagtgtggcggcaagcgccgtcagaactcttttcatgatgcttgtacctcatgcagttatttcaacttgcttgtacctcatgcaggacttcattattaagacggtcgaattcgccgttcgcccgccagatgtagataccggtgagaacaaaggagatcacaatcactccaacaccaattggaataccgcgtgtgacgctggtgttcggattcagcggcgtgcccagccagccgggcgcgaaggcgatcagtaaaataaagccgatataaactgccagcataataatgctcaggatggtggcaaaccgttgccgtttttcgactaactccctgaaatgcgcattgtcttctatccgctgataaatagtgccattcatcacagattctccagaggtaatgtagggattgttttaattcccgctcccttatgggagaaggttaacgctcgggtaacccttgccgaatgtaggccggataaggcgtttacgccgcatccggcaatcaatgcctgatgcgacgctgtcgcgtcttatcaggcctacaaaccgttaccgactcgcatcgggcaattgtgggttagcttggcatcgcgatagcctgcttctcttcaagcagcttctcgactacgccaggatcggcaagcgtgctggtatcgcccaggttgctggtatcgcccgccgcaattttgcgcagaatacggcgcataattttgccggagcgggttttaggcagggagtcggtccagtgcagcacgtctggcgtcgccagcgggccaatctctttacgcacccagttgcggacttctgcgtacagttctggactcggttcctccccgtgattaagcgtgacgtaggcgtagatcgcctgacctttaatattgtgcggaatacctactacggcggcttcggcaatcttcggatgcgccaccagcgcgctctcaatctctgccgtccccagacggtgaccggagacgttcagcacgtcgtccacacgcccggttatccagtaatagccatcttcatcgcgacgcgcgccgtcgccgctgaaatacatatttttgaaggtggagaagtaggtctgttcaaaacgttcgtgatcgccaaacagcgtacgcgcctgacccggccaggagtcggtgattaccaggctaccttcggtggccccctccagcgggttaccttcgttatcgaccagcgccggttgcacgccgaagaacggacgtgttgcgctaccggctttcagctcggtagcgccaggcagcggggtgatcatgaaaccgccggtttcggtctgccaccaggtatcgaccaccggacatttctcgttgccgatttttttccagtaccactcccacgcttccgggttaattggctcgcccacggaaccgagaatgcgcaggctgctacggtcggtgccttcgatcgctttatcgccttccgccatcagcgcgcggatcgccgtgggtgcggtatagagaatattgacctgatgcttgtccaccacctgcgccatacgggcaggcgtcggccagttgggtacgccttcaaacatcagcgtggtcgcaccgcaggccagcgggccgtacagcaagtaactgtgtccggtcacccagcccacatcggcggtgcaccagtagatatcacccggatgataatcaaagacatatttaaaggtcagcgccgcgtacaccagataaccgccggtagtatgcagcacaccttttggcttaccggtagaaccggaggtgtagagaataaacagcggatcttcggcgttcatctcttccgcctggtgctgatcgctcgcttgctcaaccaggtcgtgccaccacaggtcgcgcccttcctgccagtcaattttcccgccagtacgcttcagtaccaccacatgctctacgctggtgacgttcgggtttttcagcgcgtcatcaacgtttttcttcagcggaatactgcgcccggcacgcacaccttcgtcggaagtgatcaccagtcgactgttggaatcaataatgcgcccggcaacggcttccgggctgaagccgccgaaaatcacgctatgcaccgcgccaatgcgggcgcaggccagcatcgcaaccgcggcttccggcaccatcggcatataaatcgccaccacatcaccttttttaatgcccagctcgagcagggtattggcgaagcggcagacgtcgcggtgcagctctttatagctgatatgtttgctctggctggcgtcgtcgccttcccagatgatggcggtacgatcgccgttttcttgcagatggcggtcaaggcagtttgccgccagattcagcgtgccgtcctcgtaccatttaatggacacattaccgggggcaaaggaggtgtttttcaccttctggtaaggtttgatccagtcaagaatttttccctgttcgccccagaaggtatcaggtacgttaatagattgttgatacatcgcctcgtactgctgagggtttatcaggcaacggtctgcgatgttggcaggaatggtgtgtttgtgaatttggctcatgcttttgttctccttgtaggatgttaataatatgtggcataagcgttaaatgtaggggtattggcagttttgtttagtatttgggcgacagatcacgcaaaagtagaattgtgcaaataaacggcagggtaatttttgaaggtcagcaacaaaagttgattaattctttgaggaacatgcagttatgcatgctgttgaaaaagaggaagatactgactaactctaaagtggtattttacatgcacttacaattgattaaagacaacattcacagtgtggttatttgttacacataggggcgagcaatgtcatgacagtgtaggtgcggttactgtcgtgaaaaacaataaaaaccgccattgcaacaatggcgcaattcggatgaagcccctatgacaaggataaaaataaacgcacgccgtatcttcagcttattgattccttttttctttttcacttctgttcacgctgaacaaacggctgctcccgcaaaacctgtaactgtggaagcgaagaatgaaacctttgccccgcagcatcccgatcaatatctctcctggaaagccaccagcgaacagagtgagcgtgttgacgccctggcggaagatccacggctggtgatcctgtgggcggggtatcccttcagccgcgattacaacaagccgcgtggacatgcttttgctgtgaccgatgtgcgtgaaaccctgcgtaccggtgcgccgaaaaacgctgaagatggtccgctaccgatggcatgctggagttgtaaaagcccggatgtggcgcgtctgatccagaaagacggcgaagatggctacttccacggtaaatgggcgcgcggcggtccggaaatcgtcaacaacttaggttgtgccgattgccataacaccgcctctccagagttcgccaaaggcaaaccgaagttaaccctttcccgtccgtatgcggctcgcgcgatggaagccattggtaaaccttttgagaaagccggacgtttcgaccagcaaagcatggtttgcggtcagtgccatgtggagtattacttcgacggcaaaaacaaagcggttaaattcccgtgggatgacggcatgaaagtcgaaaatatggagcagtattacgacaaaattgccttctctgactggactaactccctgagcaaaacgccaatgctgaaagcgcagcacccggaatatgaaacctggacagcgggcattcacggtaaaaacaacgtgacctgtatcgactgccatatgccaaaagtgcagaacgccgaaggcaaactctacaccgaccataaaattggtaatccgtttgataacttcgcccagacttgtgcgaactgccatacccaggacaaagctgccttgcaaaaagtggtcgcggaacgtaagcagagcattaacgacctgaaaatcaaggttgaagatcaactggttcacgctcacttcgaagcgaaagcagcgctggatgcaggcgcgacggaagctgaaatgaagccaattcaggacgatatccgtcatgcccagtggcgctgggatctggcgatcgcttcccacggcattcatatgcacgcaccggaagaaggtttacggatgctcggtacggcgatggataaagcggcggatgcacgcaccaaactggcgcgcctgctggcgaccaaaggcatcacccatgaaatccagatcccggatatcagtaccaaagagaaagcccagcaggccattggcctgaacatggaacaaatcaaggccgagaagcaggacttcatcaaaacggtgatcccgcagtgggaagaacaggcacgtaaaaacggtctgttaagccaataaccccgttccgcctcgcaaggggcggaaaacacaatggagtgaatatgagcgtattacgtagcttattaactgccggggtgctggcgagcggcctgttgtggagcctgaacggaattaccgctacccctgcggcgcaggcatctgatgatcgctacgaagttacccagcagcgtaacccggatgccgcctgtctggactgtcataaaccagataccgaaggtatgcatggaaaacatgcttccgttatcaacccgaataacaaactgccggtcacctgcaccaactgtcacggccagccaagtccgcaacaccgcgaaggggtgaaagatgtgatgcgctttaacgagccgatgtacaaggttggagagcagaacagcgtctgtatgtcctgtcatctgccggaacagttgcaaaaagcgttctggccgcacgatgtccacgtaaccaaagtggcgtgcgccagctgccattccctgcatccacagcaagatacgatgcagacgttaagtgacaaaggacggattaagatttgcgtcgattaccacagcgatcagcgcaccaatccgaactttaacccggcgtctgttccgttgcttaaggagcagccatgacctggtctcgtcgccagtttctcaccggcgtcggcgtgctggcagccgtcagcggcaccgcagggcgcgtggtggcgaaaacgttgaatatcaatggggtgcgttacggcatggtgcatgacgagagcttatgcatcggctgtaccgcctgtatggatgcttgtcgggaagtgaacaaggtgccggaaggcgtcagccgcctgacgattattcgtagcgagccgcagggcgaatttcctgatgtgaaatatcgcttcttccgtaagtcttgccagcactgcgatcatgcgccgtgcgttgacgtctgcccgaccggtgcgtcttttcgcgatgctgccagtgggattgtcgatgttaatccggatctctgcgtcggttgtcagtactgcatcgccgcctgtccgtaccgcgtgcgctttatccatccggtcacgaagacggcggacaaatgcgatttctgccgtaagaccaatttgcaggccggtaagttgcccgcgtgcgttgaagcttgcccgaccaaggcgctgacgtttggcaatctggacgatcccaacagtgagattagccaactgctgcgccagaagcccacttaccgctacaagctggcgctgggaaccaaaccgaagctgtaccgcgtaccgtttaaatacggggaggtgagccaatgacgcagacttccgcatttcattttgaaagcctggtgtgggactggccgattgccatctacctgtttttgattggtatttctgctggtctggtgacgctggccgtgctgttacgtcgcttctacccgcaggcgggcggtgcagacagtacgttgctgcgcaccacgctgattgtcgggccgggcgcggtgatcctcggtctgttgatcctcgtcttccacctgacaagaccgtggaccttctggaagctgatgttccactacagttttaccagcgtgatgagcatgggggtgatgctgtttcagctctacatggtggtgctggtgctgtggctggcgaaaatctttgaacatgatttgcttgccctgcaacaacgctggttgccgaagctggggatcgtgcaaaaggttctgagcctgctgacgcccgttcatcgcggactggaaacattgatgctggtgctggcggtgttgttgggggcttataccggctttctgctgagcgcgctgaaaagctatccgttcctcaataacccgatcctgccggtgctgttcctcttctccggcatcagctccggtgcggcggtggcgctgatcgccatggcgatacgccaacgcagtaacccgcattccacggaagcgcagtttgtacaccgtatggaaatccctgtggtatggggtgaaatcttcctgctggtggcgttttttgtcggtctggcgctgggcgatgacggtaaagttcgtgcgctggtggcggcattaggtggcggtttctggacgtggtggttctggcttggtgtcgccgggctggggctgattgtgccaatgctgctcaaaccgtgggtcaatcgcagttccggcattcctgccgtgctggcggcgtgtggggccagtctggtcggcgtgttgatgctgcgctttttcattctctacgccggacagttgacggtggcgtaagccagaaaagaggtggtttctggacgtattccttcctgaagtcggttttctggcgttgttgttaagtctcggggtcaacgtgttgaccccgttgacggccttcgcgggagtgcggttgcgctggcctgccatgatgcgactcacttgcatcggcattctggcgcagttcgcgctcctgctgctcgcctttggcgtactgacgtattgttttctcatcagcgatttcagcgtcatttatgtcgcgcaacatagctatagcctgctgagctgggaactcaagctggcagcggtgtggggcggccatgaaggtagcctgctgctttgggtgctgctgctttccgcctggagcgcgctgtttgcctggcattatcggcagcaaaccgatccgctatttccgctgacgttagccgttttatctctcatgctcgccgcactgctactgtttgtggtgctgtggtccgatcccttcgtgcggatatttccaccagcaatcgaaggccgcgatctcaatccgatgctgcaacatcccggtcttatctttcatccaccgctgctttaccttggctatggcggtttgatggtagcggcgagcgtggcgctggcgagtctactgcgcggcgagtttgatggtgcctgcgcccgaatttgctggcgctgggcgttacctggctggagtgcattaacggcggggatcatcctcggttcctggtgggcctactgcgaactcggctggggcggctggtggttctgggatccggtggaaaacgcctctttattaccctggctttctgccactgcgctgctgcacagtttgtccctgacacgccagcgggggattttttgccactggagcctgttgctggcgatagttactctgatgctgagcctgctgggcaccttaattgtccgttctggcattctggttagcgttcatgcgttcgcgctggataacgtccgcgccgtgccgttgttcagcctgtttgcactgattagccttgcgtctctggctctgtatggctggcgagcgcgggacggtggcccggcggtgcattttagcgggttaagccgggaaatgttaatcctcgctacgctgttgctgttttgcgcagtgctactgatcgtgctggtgggaacgctttatccgatgatttacggcctgctgggctggggacgcctctccgttggcgcgccgtattttaaccgcgcgacgttaccgtttggtctgttgatgctggtggtgattgtgctggcgacgtttgtctctggcaaacgcgtgcagcttccggcgctggtagctcatgcgggcgtgctgttatttgccgctggggtcgtggtctccagcgtcagccgtcaggagatcagcctgaatttacagccgggtcagcaggtgacgctggcaggatacaccttccgttttgagtgcctcgatctacaagccaaaggcaattacaccagcgaaaaagcgatagtggcactgtttgaccatcagcaacgcattggtgaactgacgccggagcggcgtttttatgaagcacgccgtcaacaaatgatggaaccgagtattcgctggaacggcatccatgactggtatgcggtcatgggggagaaaactgggccggatcgttacgcttttcgtttgtatgtacaaagcggtgtgcgctggatctgggggggaggattgttgatgattgcgggcgcattgttaagcggatggcgggggaagaagcgcgatgaataaagggcttctcacgctactgctgttatttacctgttttgcgcacgctcaggtcgtagacacctggcaattcgccaatccgcaacaacagcaacaggcgttaaatattgccagccagttacgttgtccgcagtgccagaatcaaaacttactggaatccaacgcgccggtggctgtcagtatgcgccatcaggtttacagcatggtggcggaggggaagaacgaagtcgaaatcattggctggatgaccgaacgctacggagattttgttcgctataacccaccgttaacgggtcagacgctggtgttatgggcgctgccagtggtgttgttactgctgatggcactgatcctctggcgagtgagggcgaagcgatgaaacagcccaaaataccggtgaaaatgctgacaacactcacgatattgatggtatttctctgtgtcggcagttatctgttaagcccaaaatggcaggcggtacgtgcggagtatcagcgtcagcgcgatccgctacatcagtttgccagccagcaaaccccggaagcgcagcttcaggcattgcaggataaaatccgcgctaatccacaaaacagcgaacagtgggcgttactgggcgagtactatctgtggcaaaacgattacagcaatagcttgctggcgtaccgtcaggcgttgcaactacgtggtgagaacgctgaactgtatgcggcgctggcgacggtgctttattaccaggccagccagcatatgaccgcccagactcgcgcaatgatcgacaaggccctcgcgctggacagtaatgaaatcaccgccctgatgctgctggcttccgatgcgtttatgcaggcgaactacgcgcaagccatcgaactatggcaaaaagtgatggatctcaacagtccgcgagttaaccgaacacagctggttgagagcattaatatggcgaaattgttgcagcggagattggattaatcatctggtgatgaagattatgtcattgagctgcataaaaaataatcgaatgaacatatgccaaaaataatcactaatcagtattattgcagattaaacaaataaaaatctttccataacaaatggttattcattaatcctgccataaactcgcgttattatgcattaatgcagcgaaaagctctgttgttaaagggttgcgcaacataccgcgcaaatgatactgatcataagcgttaaaaaaatctacaaaccaacgcaacacaattcatgccccggcagtatgtcacgttctcgcgtttctgaacggggaacggcgctccattgaggaagtcattcatatgaaaaatataaaattcagcctggcctggcagattctgtttgctatggtgctgggcattctcctgggaagctacctgcactaccatagcgacagccgcgactggctggtcgtcaatttgctctctccggcgggtgatatcttcatccatctgattaaaatgattgttgtgccgattgtgatctccacgctggtggtgggtatcgcgggtgttggtgatgccaaacagctcgggcgtattggcgcgaaaaccattatctacttcgaggtgatcaccaccgtcgccatcattttggggatcactctggcgaacgtcttccagcccggtgccggggtggatatgagccagttggcgaccgtcgatatcagcaaatatcagagcactacggaagcggtacaaagcagttcccacggcattatgggcacgattttgagcctggtgccgacgaacattgtggcgagcatggcgaaaggcgaaatgctgccgatcatctttttcagcgtgctgtttggtctggggctttcttccctgcccgcgacgcatcgtgaaccgctggtgaccgtgttccgctccatctctgaaaccatgtttaaagtgactcacatggtgatgcgttatgcaccggtgggtgtgtttgcgctgattgcggtgacggtggctaactttggtttcagctctctgtggccactggcgaaactggtgctgctggtgcatttcgccattctgttcttcgcgctggtagtgctgggaattgtggcgcgcctgtgcgggttaagcgtctggatcctgattcgtattctgaaagatgagctgattctggcgtactccactgccagctctgaaagcgtgctgccgcgaattattgagaagatggaagcctacggagcaccggtgagcatcaccagtttcgtggtgccgaccggttactcttttaaccttgatggtagcacgctgtatcaaagtattgccgctatcttcatcgcgcagttgtatggcattgacctgtccatctggcaggaaatcattctggtgctgacgctgatggtgaccagcaaagggattgctggcgtgcctggcgtgagctttgtggtgttgctggcaacgctgggtagcgtaggtattccgctggaaggtctggcgtttattgctggtgttgaccgtatcctcgacatggcgcgtactgcgctgaacgtggtgggtaatgcgctggcggtgctggtgattgccaagtgggaacacaaatttgaccgtaagaaagcgctggcttatgagcgtgaagtgctgggcaaatttgataaaactgcggatcaataattgaagattgccggggatatccacccggcaatgtgtgaatgcctgatgcgacgcttgccgcgtcttatcaggcctacgccagacagcgcaatagcctgatttagcgtgattttgtaggtcggataaggcgtttatgccgcatccgacatcaacgcctgatgcgacgcttaacgcgtcttatcaggcctacgccagacagcgcaatagcctgatttagcgtgattttgtaggtcggataaggcgtttacgccgcatccgacatcaacgcctgatgcgacgcttgccgcgtcttatcaggcctacgccagacagcgcaatagcctgatttagcgtgattttgtaggtcggataaggcgtttatgccgcatccgacatcaacgcctgatgcgacgcttaacgcgtcttatcaggcctacgccagacagcgcaatagcctgatttagcgtgattttgtaggtcggataaggcgtttacgccgcatccgacatcaatgcctgatgcgacgcttgccgcgtcttatcaggcctatcttaaccgttggttaatttttcaaactcttcacacccggtatcaaacccttccatacagctcaggttcaaccagtgcagcgccttttgcttgttcttctcgataaaaccttcttcaccgtttaagaacatcattcccgcccagtactcggaataaccggttcgggaaattgcagagctgcgtttgaaataccaggttgccttgtcatcgtcggccttaatgcccacgccgttggcgtaaatcaaaccaagcagcatttgggcatcgacggcagagtcgttctccagatcttcgctggcgttttctaacaggctaattgcctttggataatccggtttacccgcttgagtatttaccagaatatgcgccagcgttacttcaccttctttactgcccgcttgcgccgctttctctgcaagaacttttgcttgtggatagtccagactgaccggattggtgattttgatctgcgccagcagcgcgcaggcatcagcatcaccgctgtcggcggctttctgtgcccaatattcggctttgctcaaatcgccggagctaaaccagctgtcggcaagaaaatattgtgcgcgtcggtccccggcctctgctgcctttaaatactggctgccaggctcggagtcgttggcgtgggcaaagaatgtcaaaaacaacatcaatgcgataatttttttcattttgataatacgattgggtagggagtaaccagtataaagagttcgaatggataaaaaaacagcctccgaaaggaggctgtagaaaggacggtattacgccagtgccgcttcgcgcaggcgagttttcaacttgttgtactcgtcaatcacgtactgctcggcggcgcgctgatcggcgatcggctcgacgcgaacggcgcagtatttgtactccggcgttttcgtaatcgggcttaagttttcggtaaccagctcgttacaggcaccaatccaccactggtaggtcatgtaaatcgcccctttgttcggacgatcgctgacctgcgcacgggtgataattttgcctttacggctgtgcacccaaaccaatgcctcatcttcaatacccagacgtttggcgtcttcggtattgatttgtgcgtagccaggttcatcagccagcgccgccagtgccgcacagttaccggtcatgctacggcaagagtagtgaccaacttcacgcaccgtactcagtaccatcgggtactcgtcggtgagtttgtcgattggcgctacccagtcgcaggtgaagaactgcgccagaccgttcggggtatcaaacttctctttaaacagataagaagtcccctgatcggcatcactagtatcgcggcaaggccactgaatgaagcccagttcgcccattttctcgtaagtcgcaccgtagaaatccgggcacagatgacgcaactcatcccagatctcctgggtgttgttgtagtgcatcggataacccatacgggtggcgatttcactgatgatttgccagtccgttttcagatcccatttcggttcaaccgccttgaagaaacgctggaagccacggtcagccgcagtaaacacgccttcatgctcgccccagctcgtactcggtaaaataacatccgccgcgctcgcggttttggtcataaagatgtcctgaacgataaccagttccagatcttcaaaggctttacgtactgcgctcagctccgcgtcagtttgtagcggatcttcgcccataatgtacgcggcacgcacttcgccatgcgctgcgcggtgcggcagctcgctgatgcgatagccggtatgcgctggcaggctttccacgccccaggctttggcgaatttctcgcggttagccggatctttcacgtactggtatcccggatacgtatccggcagcgcgcccatatcgcaggcaccctgaacgttgttctgaccacgaaccgggttaacacccgcatgcggcttaccgaggttaccggtcagcatcgcgaggctggtcagagaacgcacggtttccacgccctggtagaactgggttacacccatgccccacaggatggcggcgcttttcgcctgggcatacatccgtgccgcctgacgaatctcactggcgctgacgccggtgatatcttcaacgctctccggcgtgtagccttcaacgattttacgatactcttcaaagccttctgtacgactagcgacgaacgctttgtcgtacagattttcttcaataatgacatggcccatcgcattcaacagcgcgatgttgctgccgtttttcagtgcaatgtgcatgtcagcaatgcgcgcggtttcaattttgcgcggatcgcagacgataattttcgccccgttacgtttagcgttaattacgtgattcgccacgattgggtgggaatccgccgggttgtacccgaaaacgaacactaaatcggtattatcaatttcgttaatagcattgctcattgcgccattaccgacgctttggtgcagacctgcaacgcttgggccgtgtcagacacgagcgcagcagtcaacgttattggtaccaataacggcgcgcgcaaatttttgcattacatagttggtttcgttacccgtaccacggctggagccggtcgtctggatggcatccggaccgtacttctctttgatggcgctcaggcgctcggcaacgtaattcagtgcctcatcccaggaaacaggttcgagtttgccgccacgctggcgacggatcatgggggttttcaggcgcggggtcaggatctgggtatcgttaatgaagtcccagccataataacccttcagacacagggtaccctggttggttttcccctgcgctgcctccgcccggacgattttgccgttatcgacgaccaggttgattttgcaaccacttgcgcaataggggcaaaccgtgacgacttttttcatcggtctcgctccagttaatcaaatcacgcatacgcgctctcgactacagtatgcatcttttatgccacattttatgtggggtcattccctgatattacgggcactatttattcaaaactctgacgaaaaacaggctgtcgtcagttttgacgtgacgaaacgaaataccgcgtgacagccatcacgcggcagacattttattttttctcgacgacgggacctgcctgatacccgccgcccaggcttttcatcaactgaatgctttggatcacccggcggctgtccagcatcagtaaactcatctcttcggcaagcactggcaaccgggcttcggtggcctgtaagcggctggttaagccgcgctgataggcggcctcggcagcgcgctgggtaaagcgcgtggcttccacgcgttcagcctgcatttctcgctcgtcgttgagcgtttgcagacgcgtgccgttgacggcaacgtcacgcaccgcgttcagtacactctggttgtaacgttcaatcatcatgttgctggcggcgcgcgtgccttcgagattggcattcaaccgtccaccgtcaaacagcggcaatttcagacccgggatgaagttgaactggcgactggtttttttgaataaggtatgcagatggatggagtccagaccgaaaaacgctttgatatcaaagctcggatagaacaacgcccgcgcggaatccacctgatctaaactcgcctgaacataccagcgcatggcttgcagatccgggcgtctggcgagcaactcataagagagtgtcgccggaatgccggtctggacttgcggtaatgccaccggtctgatctccggcatatcgctggctcccgcgccaatcaatgcacgcagagattctcgcgtttcggtgatttgccctttgacggcaacaatttgtttatcgaccgccagaatctgtgcccgcgcgccgtggaaaggcacttgcgcttccagaccgtgcgccactttactctggtgcgctttcaccgcgtaatcaatcacatcgtgagtttgttctaacagatcgagcatctgatagctggcctgcatactgtaataaagctgcgctacgcccgtggccaggcttagctctactgctgcggtttctgccagcgcggcattatgcgcgccaatggcggcggcaaccgcactgcgatgcacaccccacaaatcaagatccagtccggcaaacaaacctactgtggcttccgtatagtacggcccgtccatacccagtgctggcgcatccatactataagggcttaaaaagccgttcgcgctgacacgttggcggttgagcatccctaacgctgcgacctgtaattgactaccggcatctaacaaatcggcctgggactgcgctttttcttcccgcagtttcgcttcggcgagggtgtgactaccacttagcgtccgttggatcagcgcatccagctgcgggtcattgagttgtttccaccactgcgcctgcggccagccggagctggcaagatgaatatcgtcggccagtttgatttgttccggtttgagctgttgatgaggtgcagaatccttacgtaccagggcacagccggaaatcagcgtcgtgctgccgagaatgctgcacaacagcagacgactaagttgacgattgatcattgcgtggctccttgtgcctgttccgtggcgggcgttaatgccggggctgtccagtctggcaagcgggcgaaaagctggcagacgtgttgctcctgttttaataaggtgggcaggatggcctgagaggcgggtgtctcttcaagcgttatttgaggagaacggctgagtgcggttgccagaccggcagcgtatttctccagggcgtcggcaaactgacctgctctgtccggctgtagtgcgttatccagcgcctgcgcgctgttccaggtggcatcccaggcgtgaagaagatcgcggccctgacgaataaccgtttggctacgttcaatcagtaatgcgcgttcttcgctgtccagttgacgctccagcgccacgcgttggcacatctcttcacaggcattaaacgccgcatgcagaccgatacgaatttgcagataagtgcgcagagccgtgacttcctgctggcgtgggatccgcattactttacttaacatacccagcgtgccagccagtttttgcggcagtgtgcgcgcttcactttcaggccagacaaaggtgtaaatcaccgcggacaccacggtaccaatgatgatacccagggcgcgatcgcgaatttccaccaggtcgtacactgggccaaaaacgttttcgagcgtggcgagcgcgaaggtgaccaccatctgtgtgccgatataagaagagcgttcagagctggtggcaatccatgcgcccaacaggaaaatcggtgccagcacaaacagcaattcgacaatattgtccagccagggcatgaccagtagcgtgaataacagcgccagaatcgcgccgcaaaaggccccgccaaaacgcagcaccatcttctggtagctgctaccgacatttgggttagcgacgatcacgcatgtcagcatacaggtgtgaatgccttcccagtccacgccgctgtaaaaggtgtaacagatcaaacaggcgagcagcgtttttaccgcgtagcgcatatagtctggattggtaaaagcatcggcggccatacttggcggtttggctgcgggcgttggcggcgtattcgggtccatctgacccagttgtaacaacgtctggcagatattctccaggttacattcccgtgccgccatcgcttcactttcactgatccgccagtcgctttgccagcactgaccttcagcaacggcatgctgcagcttgttgatttcactagctaatttttgtcggaattcaataattgcctgagaatcagcaaaagaggtgggatcgtagcgattcagcgtgctgtaaatgtaggttaccgttgccacgcagctttgccaccatgcgttttgagttcgccagttggcatcgtccgcgaggcaaaagacattgagtttttgtagcgccagcgcctctctttcaatccgcgtttcgggtagcggtgcgaggctgtctgtcaggtgactaatggcatcatcaagccgatcattaagcgcctgatgcatttggctaatggcacgactgggaaaccacagcacgccgattaacgtcatcagcaaggttggatagaggccaacaacgatacaccacagcgttaagcgcacgaccacttccggatagtcgagcatggcggggaaggtttgcccgtaaatagcgacaatggcgacggcgaaaaagaccagccccaagcgatgggtgcgcatcaaaaacatgcagcccatcaggatcggtccggcgatgatcaatcggatcaacggttcgccgtaactccatttgtagatcaaaaacaggctgccgatctccagcaccgtggcaaccacaaacaagatcgcgacaaatttggtgtaaaacgcgttgctctgaataccgtaaaacagcactgccaggcttaacgccacaaaagggatctcaaaggtcatgctgatcagaatcaccagcaggcagcctacccagagttgcacggtctgcggcacgcgacctggtcgccgctcgcttaactcttcatgaaagaacgccagcagcctgaccaccggtaatggcagggagttgagcgcgctcattattgcggctcaagattagcgactgcgctagcgccgatgcggaacatttccgggtcaggtttatcgaccatgattttgaccggaaaacgctgggcaacgcggacccagttaatagaacgagacactttcggcaggccgcccagcaccaggccgccgtcatccggtagcacgccgtagccaatgctatccactttaccctcgaaggttttgccgctgtcactcatcaggcgaatcgttgcgggtgtaccactgcgaatatttttcagatcggtttcgcggaagttggcgatcacataccagtgacgagtgtcgattagggtaaaaatagggcgcatggcagaagcaaattgcccgacggaggttttgagggaaatgacccggccatcaaacggcgcgcgaacggtcgccatttccagatgcagtttggtcagggcaatatccgcttcgaccgccgcacgctgggcaactaatgcatccacgccgctgacggcgctggcggcactctgcgcctgtaacaatacggcattaagatccgcttctgcggcgcgctgcgccgttcttgcacggtcaacatcttccgcactgacaaaaccttctttcagtaatggctcggtgcggcgtaatgtatctgtggcctgtttcgcggcggcacgggctttttctatcgtggcattaacgctgtcggcaccaaactgttgcgcgtcaacgctacgctgggtgagcataatttgcttatccagcgccgcgagggaggcttcagctttcgccagattggcttcgtacgggcgcgggtcgatgcggaacagcaaatcgccctgtttgactgcctggttgtcggtgaccgccagttctacaatgcggccgctgacttccggtaccacatcaatggtatctgcactcgcgtaagcgtcattagtacttggcgcactgtctacgcgccagataacgaaaacaagggcaaccagcgccaacgcaaccactaacagagcagggaatttactgcgaggagcttttttcggcgtactttccatgagcgcgtctcaaatagattagaaaaatgccagccagaacagcatggcgtagagagcaaaaagggcggtataaataattccgacaaatgccagattgatatttgcccgctgaataactcgcctcgtgatgagcgtcaaaataaggctggcaatggcgcagaaaaaccagctgggataataagcgccgatcaccgggattgccggagataatgagcatcccgaaaccatgaagacgggaattatccaggctgtttttttgagttgcatcgccatgcgagagagaactgttggcatattaaatacatcctgtctgctgcgaacaatatctgtagtgaatatcaatatccattgaaggcgtcagtatggctattttcttgatgaataaaaatagctttattcagccaccgcattcataacttatatattttatttattaattggctgtatatatttttaaaataaatacttttgggggcttcagcgcccccaaaagcgagtgacattaatttggggttacgatattcacccacaaatcgaaattatccagacaggcgataatttcttccagtttcgcgccattgccaataattttggctttcttcgcttttaccagatccgccattttggcttgtccggtcagcacggcgtgcagatcttcacggctgatgtagaaagaggcgtcggcttgcggttgcagcgttttccggtagttaagcacgctatcgttcagcgtcaggttgaggttatcgccgttgctcatattgaagttcaggctgatatttttacccgcagctttcgcgctatcgaggcgaacggccataaagtcgaacagcatttcgacgctcatcccgcgaatggtgtccggggaaccggtggtgccgtggctgaacttatgcaccccttcgcgcagctctttcgcgccggtcaggtagaaaccgcgccatgtggcggactcggcctgatagcccagctgttcaaagttattcgcttgcagattcttcgcgacctggtcacccgggttggcggcaatcacctgtttcagcagttctgcgctccagcggtaatcaccttgcttgttcgcttcttgcgccaggttgatgacacgggcagaaccgcccagcgcctgcacgtaacgtttacccatctccacctgaccatacggatgcaggttagccgggttaccgtcgtaatagccaagatagaagttatacaccgcgcgggcgttgtggctgacagaaccgtaatagccgcggctggcccagttattggcaagtgcaggcggcagcttaatcatgtcgccgatttcattcatggtgtagccctggttcgccaggtgcagggtctggtcgtgaatgtacttgatggtatcgcggtatttaccaatataatcattgatatgcttattgccccagaccggccaggtgtgcggcataaacagcacttccgcgtcgttaccccacatatccagcgtttcgttcagatactcggtccacttgctggtgtcgcgggttttcgcgccgcgcagagtgtagaagttgtgcagggtatgcgtggcgttctcggcggtacacagggctttcagggccggaatatagaagtgcatttcggctggcgcttcgctacctggggtcatcaggaagtcaaactccaggccgtcgataatcatcttctcgccagttctgacgatagttttcgtcggtgcaataatgctcgggtcgcccgttgccagcgtcacgccaaggccattacccacattgccttgcgcgttgtgcggcagtaacagaccgtaagagtagagcgcacggcggctcatgatgttacccgccagcacgttttcgctgatggcttcgtccataaagcctgcaggggcaatcacctgaactttgccggatttaacatcggcttcagagataatgcctttcacgccaccatagtggtcggtgtggctgtgagtgtagataacggcaacaatcggtttttgcggacgatgctggaagtaaaggtcaagtgcggcttttgcggcaggcggcgtcaccagcgggtcgataacaataatgcctttctcgccctcaacgaacgtaatgttagagatatcctggccgcgcacctgatacattttatcggtgactttgaacaggccagaaataccgttgatttggctctgacgccacaggctggggtttacggtttccggcgctgcggcattaatatcaaatttgtaatcgtccgcgcggtagtaaactttaccgttcgcatcacgcagaataccttcatccagcagcggggcgataaatccacgctgggcatcgtcaaaatcctgacgatcgctaaacggtaaacttttggcgtaattctgattaacctgttgggtatattgagtggcggctttcgcttcctctttcgcgttagcggtatttaccatcatgccgctggcggcagttaacgcaataacaatcctgctcaaacggaataaccgagagttattcatataaatctccatttatcatttatgtcgtaaatatgtaatccatgcaaaatacgtcatttaaagctggcgttatcataattgggaaattgcgactttaataagtggaagtgtgagcggaacgcgccattttattaggcatttgtgctgaagagggaaaattacagtaaaactatcattgcagaaaataatatgagtcgttttatgtgtttattatatatattgtacctgtcgttggcacagcgggacattgcgctactgtgccaacgttttactcatggggctttagcacagaactgtggcaaaaaacgttgatgcgccaatattgctgcaccctgagcgccattaaagtcagaagaactggcggcaataaagcgcacgacctgatgcggcagtggacggcgcaggtacttttgggtcatggcaacgagagtctcgcgtgggaaggcgggcatatccatcacgccaccgcccaggatcaccgcatcgggatcgaacagattaatgctggtggcaatggcccgtgccgcgttttcaagcagactctggacgaaaggggcgttttccgcatggacgaaaagatcgcgcaatgggtaatttcggggctgttgttcgtaccagcgtcttagcgccattccagagcaattggtttccaggcacccaggattgccacacgcgcagtgttgggtcatatctcccagggggatatgacccagttcgcctgccacaccgtgtgcacccgtccacggcgcaccgttcatccacactgcgaaccccatccccgtaccgagataggccgccagaaccagttgttgcgtaaggcggttttctactacgtcccaggagagttgcaggttaacgtcgcgggaaaactcaaccggacaattcagcgtattttcgagcttatcggcgagatcatataaatccgccgctgttaacggcaggttaggcgtagaaataatggtgcgtttatctttactgaccagcgccggaaatcccatcaccagaccatgacagcgagcgttaaagcgcctgagttgctcgtcaatcatttcgccgataccgctcaccaggccgggagcaatgacttctgcggtccgctttttttcgcagtgtagcgtttcaccttctgctgtccgcagacaaaagcggatatgcgttgcccccatatccacgcccgctacgacgttatgctgtttttgcatgaggctgtacctcgctttttgcagccagaatctgcgcggtcataattctccatgcttcgtcgatattttccgcatgattaaacaggccggaagtgccgacgataaagacatccgcccctgccgccatcagtttttcgtaagttgcctggttgcaggaaccgtccacctcaatttcgtactccagaccttctcgttcacgccatgccttcagttcggcaagtttatccagcatttcaggaatgaacggttgtccggcaaagccgggatcgacagtcatgaccgtaattttatcggccttatggatatagtatttcatggcctcaactggcgtctccgggttaaggatcagccccactttcatgtcatgacggcggatttcatcaatcaggcggaacgcctggccgttgatggtttccggatgcagagtgatgaaatctgctcccgcacgcgccagttgagcaatgtaatcctgcggccgcgtcaccatcagatgacagtcgagcggtttagttgccagttttttaacctgacttacgaagaacggactgagtgtcagattggggacaaagtgaccgtccatgatatcgatgtggaagtaatcggcatggctgtcgataaattcgatctgttctttaaatttcagcagatccatacacattaagctgggggagattttcatgttcaattccttacttactgataagacggtcaagggcgacagccgcgataattaatccgcccatcaccaccagttggtaataggtttgtacctgcaaaatattcagaccgttgttgatggtgccgatgatcaacccgccaatcaccacagagaaaatgcgccccttgccgccgaagaaactggtgccgccaatgatggcgctggcaatggcataggtttcaaaacccataccggcaagcggttctgcggcaccgagtcgtgcagtactgacgacgcctgccagacctgcacaaacaccggagatgataaacaccaccaggatgtggaatttcacgtcaatcccggaatagaacgcgctatttttgttgccgcccagtgcgtagatgttgcgcccgagccgcatacgcgttgtcagaaaccaaaggatgagcgcgacaattagactgaagataacggggacaggtatcccaattacgctggcggcaaagaagttcacgaagtcaaaactgaagccgtatacgctgttggcatcggagatcaccagcgtgatcccacggaaaatcgcgttggtgccaagggtgatgatgaacgggtgtagccccgtccagttgaccaggcagccgttgatcgcccccagtgcgccgccaaccagtacaccgccaatcatcgctgcgagaaacgggtcaacacctgccaacatcagtttggcggtcaccataccggaaagcgccagaatcgcgccaacgctgaggtcgataccagcgaccaggatagcgaaaaactcgcccatgccgatcaataccgtcacggagctttgaataaaaatctgggtaatattattggtggtcagaaaatattctggactcaggctaccaaagatggcgacgatgatcgccaggataaaaaaggtgccgtatttatcccagaacagcgcaaagttgaacggtttcttctcgctcgcttcgctttttactcttgtggtaaagcccatgccataatctcctcttcgctcatgtcatcgcgattcgtcaggatttgcgtcagtcgtccttcgcagaacacggcgatgcggtcgcagacggtgataatttcaggtagttcagaactcaccatcaggatgacttttccgtcgtccgccagttggcgcatcactttgtaaatttcggctttcgcgccaacgtcgatgccgcgggtaggttcatcgaaaataatcacttccgggcaacagcacagccatttggagatcaggactttctgctgatttcccccggagagttcggtgatattctggtttacgctatgacatttcagcgccagcagttcgcgttgattttcagcggtacgttgctcgtcaacttcatgaaacaagcccatcgcgcctttatagccgccgtctttcagactgcggctgatcgccatgttctgagcgatggaaaagttggggaaaaaaccgttatcccggcggctttcagtgatgtaagccatcccttttttcacggcatccaggggactacgtggagagatatctttgccattaagacggatttctccgccagcgcgtttatccacgccaaacagacaattcatcagttcagtacgtccggaaccgaccagtccggcaaagcctaatatttctccccggcagacgctaaaactgatatcccggaccttttttctgtcacgactggtgacgttccgcacctcaaaaaccgtttcgtgcgcaaggttgctgacattctccttcatcgcgttaaaacggttttgcagttcgcggcctaccatcagacggacgatatcgtcattactcacatcgcttactatgccgctgcaaacgctgctgccgtctttcatcaccgtatagcggtcgcaaatacggcgaatttccgccaacttatggctgatatagacgatggccgtaccctctttacgcaactgattcatgatcagaaacagatagtccacctctttattggtgagactggaggtgggttcatccatgatgatgactttggcatcgagcatcagcgttttggcaatttctagcatctgcttgtggctgatagataaattcgccactttctcatctagatcaactttcaagcccacgcgtaataacatcatggcggcgcggacacgcatttctcgccagtcgataatattgacgccacagatttttttcgtcagatgacgaccaatatataaattttccagtacggttaattcatcaataacgctgagttcctgataaataatcccgataccgagttgtgccgctaatttatgatccagcttgttatagctaatgttattaatggtaatggtgcctttggtcggctcatgtattccggataaaactttcattagcgtggatttacccgcgccattttctcctagtaatgcatgtatttcaccaggataaaccgttaaattaacgctctttaatgcgtgaaccggaccaaaggacttgccgatccccgccatgcttatatatggcgtggccataaataacctctctgcacgaaatatcgtattattgcctgatggctacatttatcaggtctacgttcaggttattttgttggccggataagacacttcattagcatcatcatccggcatcattcagttttattgagtgaccaggatactatcgaccagtttaaattccggtgctttatccagcgggataaccttgccggatttctcagcgtcaaccatcagcttcagacccgttgcgccgatatccgccgggttctgggcaaccgtcgcggtcatttgtccggcttccaccattttgcgggcttccggaatgccatctgtaccgacgaccagcacttttcccgtttttccggcgtttgcgactgcctgagcaacacccattgccatcgtgtcattcgcgcaatagatcgctttaatattcggattacgttgcaacacgttagtggcgacatccagtgctttaatgcggtcccagtcggcaggctggctggcgacaagcttgatctggcttgcttttttgaaggcttcggtggcaccattacgacgcgcttcaccggaggcgttaccggctttaccctcaatgattgcgacttcaccaccttcagcgcccaatttgtcaataatgaagctcgcgcctttcgccccgacagcaacgttatcggtggtgacaaaagcttccacattgccgccagcttttttcagattatccatgtcgattttttcatcgagattaaccagataaatgccttttttccatgcgcgggcgacaggcatgaccagattcacactggataatggagcgaaggcgatacctttgtaatttttattactgagatcttcaaataactgcaattgagattgaaaatcgccttcactaggagaggcaaaaatatcaacgctgacgcccagtgtttttgcttcatcttcaatgccttttttcatatctacccaaaatgggttggagagggttttcaatacgacagcatattcggcggcagcaaaagcgctggtactcaacattaagcccacgagtgtgccgctgaaatatttcagatatttattcataataatgttctcacggtaaggggacaggtaactccgcgatggcggaattacctttttcttatttcagcgcgcctggactgaagaaatcaacaattgcgccggttttttgcatattaatattagcttgttcaatgttgagctgggcgacagagacaaaaaaagcgtccagcaaagttagttgtaatattcttgcgctggcattacgacctaataacggcgtttccggggctggactgcaaataatataatcggccagtttcgctatcggactatggtagctatgggttatacaaataatctttgccccgttcttttttgccagttctacggccgcttttacatcactggttcgcccggaatgggtcactaccagcacaacatctccttcctgtaacaagctagcggacatcatcatgatgtgagcatcaggataggcctgacagcgtacgccaatgcgcaagaacttgtgctgtacatcagcacagatagcattacttcctccggcaccgtacaaatcccgctgtctggcctgatagaaaaagcgggcggcacggtggatctcatcaacgttgacgatgctctgaccttccataatggtgcgtaaagtgatgttaaataccttattcaccacatcctgcggcgcttcatcaaaagccaactcggaaggcaatacctgttcactctgagaaaaataatcttccagcgcactgcgtaagttacgaaagccgctaaaccccagcagcttacttaccttaactatcatcgcttcagataccgccagagcttctgcgacatctttaattgcgggtgcacaactcaggttaccgggtttgagtaaccactccacgatgcggctttcattttctgtcattccttcctgcttcattcgcaggtaaggcgctaaccctataccgttcggaagcgcactatcaaactcactctggctcatcacgttctcttgtccttgaattgaagacgccactatatcaccacagcaagaacagaaaagatgctggcgacttcacaaaaaaataaaatttataaagtttattttattgtgaacaatggcgagtggcttaaaattttatttcatttaattagtttaaaaacatgatgttatttgtttttctggttttttagatgatagatgttgctggatggtgagtgtctttaacgctattgcgctgtcagatgtaactctgtaaaacagatcaggaaggcgtaattcatcgattttgggtgtttttaattcattaacatcacaaatgttttttgattgtgaagttttgcacggacggggaagatgaatgaaaaagattgcatttggctgtgatcatgtcggtttcattttaaaacatgaaatagtggcacatttagttgagcgtggcgttgaagtgattgataaaggaacctggagcagtgagcgtactgattatccacattacgccagtcaagtcgcactggctgttgctggcggagaggttgatggcgggattttgatttgtggtactggcgtcggtattagcatagcggcgaacaagtttgccggaattcgcgcggtcgtctgtagcgaaccttattccgcgcaacttagccggcagcataacgacaccaacgtgctggcttttggtagtcgagtggttggcctcgaactggcaaaaatgattgtggatgcgtggctgggcgcacagtacgaaggcggtcgtcatcaacaacgcgtggaggcgattacggcaatagagcagcggagaaattgagattcatccactacttgcatggatgagtaatgattaatgtggatagagtttctttttgaggttggctaatgaaacgctttccgctatttcttttattcaccctgctcacgctgtccaccgttccggcccaggccgatattatcgacgacaccattggcaatattcagcaggcgattaatgacgcttataaccctgaccgtgggcgagactatgaagatagccgcgacgacggctggcagcgtgaagtgagcgacgatcggcgcagacaatatgacgaccgccgccgccagtttgaagatcgccgcaggcagctggacgatcgccagcgccagcttgatcaggagcgtcggcaactggaggatgaagagcggagaatggaagatgagtatgggcgatgaggttgggtatggagcaggcatcgcccctcaccccaatggggagagggagaaaacgagcgcaatattcaatatcgagcacaatcggtcccctcgcccctctggggagagggttagggtgagggggccagcgcgcacattccctctcatcacgccaccccaatctccatcccatcaaaccccacctcaaacccactcggtagtgcgttttccatcagccacgcatcaaactggtggctgatatgggtcagaatcacccgtgggctgcggataacctgattcagcgcaagcacggtatttaaatcacagtgattacgcggtgcatccgcgcgcggcgggtgactgcaatccatcaccattacctgcggctgattattgcgtaaaaatttcagcgttttttccggcaagcctgcggtgtcagacagccacgccacccggctgtgtgccgtttccagcagataaccgaaggtcagtttactgtggttgagcggcaggggcgtgacctgtaacccctgcaaatcaaacaccacaaacggttccaccgtgtggctgaaatcaagcaggcccggatgtttaaacagatcgtcgcagccctgttcatccggcgggccgtaaaccgggatcggatcgccaacgccccagcgcagcggaaacagcccctggacgtgatccatatgataatgcgtcagcaaaaactgctggaagcttccggggctccagcgatcggcgagatcgtgcagcccggcgtcgatcagggtgattgcgtcgttaaacttcactacgccgctgcacggttggcggcgatactgcgggctgcgccgcgctctggcgcaggccgcacactcgcagccccatgccggaacgccctgtgcgccgccggtgccggtgagcgtgagggtcaggctcatgttacagcgccttggtgaagcggaagtggctctgctcgtagccttcgcgcagatagaaacggtgcgcgtcgtggcgcttcacgttggtgctaagttcggtcatttcggccccggcctggcgggcttcttcttctgcccacgccagtaacttactgccgacgttcagaccgcgcgcctgcggcattaccaccaactcctgaatttcgccgatccagttgacatgatgcagatgaaactgcaaatgcaggccgatcatgccgacaacttcgccatcaagcagcgccagatggtagcgcatgtttgggtcgcgcagattggcgttaaaacccacgcgaaacgcgtggtggtcaaactccgcctgttttagctcacaaatcagcgcgtaaaccgcgtcggtgtcgtactgcgtggccgggcgaagctcacaagcaggcatggtgtttctccttctgatggatcagcgtcagcagcgtgtcgacgctctggcgcaggctgccgtcattgttgagcgtatggcaatcctgtggagtatagcgggcggcgcgcgccaggcgggcgttaatttcactggcgttttcacggccacggttttccaggcgctggcggaggatctccgggctaacctgtaaacagacgggcagcagcgcgctttgatagcgcgcccgcgcctgcggcagatgggcgcgactgccgttgaccagcacgtcgaatccggcgtgcagccagagatcaatctcgacgccgacgccataatacagaccgttagcgtgccagcttaaggccaacagattttgccccgcgcgggtaaaaaactcctgctcgctcagggcgatatggttttcacttccggcgctggcatcgcgcgtgatgtagcgatgcgccaccagtaactgagtttgttcccgcaggcggagttccgccagcaggctgtctttcccggagccggacggccccattaaccaaatcagttttcccatcatcagaacacccttttaccctgacgccagacgtggtcgatatgaatatgattgtccttgcgatgcgccagcaccaggtcggcgcgtttgccctcgccaatcaccccgcgatcctggagattaagcgcctgcgctggatttttagtcaccagcttcaccgcctgcggcagcgtaaagcggttgctctggtcatcggcgacgcgaaatgccgcatcgagcaggctggcggggtagtagtcggaagagaggatatccagcaggccaagctgcgccagttcactggccgccacgttgccggagtggctgccgccgcgcacaatattcggcgcgcccatcagcacgttcatgccatgcttgcggctggcttccgccgcttcgaacgtggtgggaaattcggcgatcacgctgccaagctggtgagattcagcaacgtgggcgtgggtggcgtcatcgtggctggcaagcgcaatttttcgcgcgcggcacagggcggcgatggattcgcgattcggctggctccagcgtgcggcgagcgccagttgctcttcttcgtactgctgcatctgcgcatcagtgagggagtatttgccctgataatattcgcgatacttctcgcggttggcgaactggcgctggcccgggctgtggtccatcaggctcaccagcgtcaccggctcgcgctgcaccagtttttcaaacagcggcagcgtggtgtgatgcggcagttcgcagcgcagatgcagacggtgctcggcgcggttgacgccgcgtttctgcgtctcttcgatggcgttgatcatcttctccagattctccagccgatcgccgccgtcgcgcacgtcgccaattgccacggcatccagtacggtggtgatgccgctcgccaccatcagcgcgtcgtggctgctcatcgcgctgtgggcaggccagtcaactttcgggcgcggggtgaagaatttatccagattatcggtatgcagctcaatcagccccggcagcagccagccgccttcgccgtccatcgcctccggcaggcggctctggctttcggcaaaggcgcggatttcgccgttctgcacctccaggctaccgcttaccacctcgttttccagcaccagcttaacgttattgataatcatgaagaggctcccattgggtgttagctcaactagaggctcccattgggtgcaggcggtcggcgacgtcattacgtacagcttcgtcatggaagatgcctacgatggctgcgccacgggttttggcttcgcgaatcagttccaccaccgcggcgctgtttttggcgtccaggctggcggtaggttcgtcaagcagcagaatggggtagtcgacgataaagccgcgggcgatgttgacgcgctgctgttcgccaccggaaaatgtgcttggtgccaggtgccacaggcgttccggcacgttcaggcgggtgagaagacgcgcggctttagcggcgcaggcttcacgcggaacgccggtatcgagcagcggctgcatcaccacttccagtgcactgatacgcgggatgacgcgcagaaactggctcacccagccgacggtggttttgcggatttccaccactttgcgcgctggcgcggtgaccaggtctacccactcgtcaccgtgtttgatctggatttgaccttcgtcgggcagatagttggcgtacaggctgcgtagcagagtacttttgccgctgccggaatggccgtggagcaccacgcattcgcccgcgttgacggtgaggctggcgcgattgaggacgggcaggcgcacgccgttttgctggtgcaggatgaaggttttactgacgttttgtacgttaatcatttttcgcctcgtggttcgggtgtcggatgcgacgctgacgcgtcttatccgacctacggggagcgcatttgtaggccggataaggcgtttacgccgcatccggcaccggctcaattctgcaaaacgctactcaccagcagctgtgtatacggatgatgcgggtcgtcgagcacgcggtcggttaacccactctccaccacttgcccctgcttcatcaccagcaaacggtccgccagcaggcgggcgacgcctaaatcatgggtgacaatcaccaccgcgaggttcagctccaccaccaggccgcgcagcaggtcgagcaggcgggcctgcacgctcacatccagcccgccggtcggttcatccataaacaccagcttcggatgcgtcaccaggttgcgggcaatctgcaaacgctgctgcataccgccggaaaaggtggtcggcaggtcgtcgatccggttggcgggaatctccacctcttccagccacttctgcgcggtggcacgaatatcgccgtaatgacgtgccccggtcgccatcagccgctcgccgatattgccgcctgcgctcacctggcggcgcaggccgtcgagtggatgctgatgcaccacgccccattcggtacgcagcaggcgacggcggtcggcctcgctcattgcatacaggctacggttctcgtagtgaatttccccctgctgcggcgtcaggcgcgcggagatgctcttcagcagcgtggtcttcccggagccggattccccgacaatgcccagcacttcccccggccataaatcaaaagagacatcgctaaagcctttgcccggcgcgtaaaggtgggtcaggttattgacgctaagtaacggttgattcattggttttttgcctcgctctgttggcggcaataatcggtatcggagcagacaaacatgcggtttccggcgtcatccagcaccacttcatcaagatagctgtgggtgcttccgcagatggcgcatggctcatcccactgctgaacggtgaacgggtgatcgtcgaaatcgagactttccacgcgggtaaacggcggcaccgcatagatgcgcttctcgcgccccgcgccgaacagttgcagggcgggcatcatgtccatttttgggttatcgaatttcgggatcgggctcgggtccatcacgtagcgcccatttaccttcaccggataggcgtaggtggtggcgatatgaccgaagcgggcgatatcttcatacagtttcacctgcatcacgccgtactcttccagcgcgtgcatggtgcgggtttccgtttcgcgcggctcgataaagcgcagcggctcggggattggcacctggaagataattatctgatcttcggtcagcggcgtttcggggatgcggtgacgcgtctggataaccgtcgcatcgtccgtacgttccgtggtgtttaccccggtcacgcgcttgaagaagttgcgaatgctcacggcgttggtggtgtcatccgcgccctggtcaatcaccttcagcacgtcgctttcgccaatcacgctggcggtaagctgaatgccgccggttccccagccgtacggcatcggcatctcgcgcccgccaaacggcacctgataaccggggatcgccaccgcttttaagatggcgcggcggatcatgcgtttggtctgctcgtcgaggtaggcaaagttgtagccgctcagattagccatggttctgctcctgttgcagacgtttgagtagctccagttcggcctggaaatcgacgtagtgggggagtttgaggtgactgacaaagcctgcggcttcgacgttgtcggcatgtgccagcacgaactcttcatcctgcgccgggcctgtcgcgtgctcgccgtactccggggcttgcagagcgcggtcgaccagcgccatcgccatcgctttgcgctcgctcatgccgaacaccagcccgtagccgcgcgtgaagtgcggcggctcacccggcgggtcgataaaaccgttaaccatttcacactcagtcatcagcagttcgccgacgttcaccgcaaatcccagctcttccggcacaatgctcacgtcgatatagccgctgcggatctcgcctgcgaacgggtgattgcgcccgtaaccgcgttgggtggagtaggccagcgccagcaaatagccttcgtcgccgcgcatcaactgctgcaaacgggaggagcgactgcaggggtaaaccggcggcgtgcgggtgatgtcatccggctgtgcgccgctatcctcttcaaacttcgccagcccctgacgcgccagcaggctgaaaacgtgcgggctcggctgctgttcgctgtcggcggtggtcagcgtcggcgcttcgccgtttgccagcagggtaaaatcgagcaggcgatgggtgtagtcgtaggttgggccaagcagctggccgccgggaatgtctttataaacggcggagatacggcgttcgagacgcatcccggtggtgtcgagcggctcgcttaccgccagcttcgccaacgtggtgcggtaggcgcgcagcaggaaaatcgcttcaacgttatcgccgctggcctgtttcagcgccagcgccgccagttcgcggtcggcaatgccgccttcggtcatcacgcgatctaccgcgaggttaagctgctgttcaatctgggcgacgctcagttcgggcaaatcggtatcgcctcggcgtcggctctcttgcagggcgtgggcggcgtcgatcgccttctcgccccctttcacggcaacgtacatcagcacacctccacatgagtggttcgcggaatagccagcaggcgctcgccacaggtcaggatcaggtcgatgccgagcgggaacggatgcgggcgctcggtgagttcgtgcagaatgcactccggcagctgcggagcgatcattcgttcttcggcaatacccgcaccagtaaggcgcaacatgcgtccgccgctcaggctggcgacctgtaaaatcagcgtcgcacccgcttccggcgcaacggcggtgccggtggaaagggcgttgagctgttcgctggaaatcgcctcatccgtcaccgcgaaggtcgcctgttccggctggctgaccagcggcgcgttggtatgaaaacgcaggctctggttgacgatatcgttatttaatggggtagaaagccacaccggcgtgtcgttatcggccagcgtcagcagcacgctggtggtggcgatattcagcggttgccagccgcgtttgagctgatgcagggcgacaatcacgcccggctcgctcatggcctttaacaggcgacgaaaactgtgctgggcatcctgcacgggaagcataaaagcggtttccagggtcatgcgttgtctccgcgaaccatcgtaaagaagtcgacccggctggcgttcacttcggcctggcgtgcggcaatgcgtgccatacggtcagcgtccagcggggcaataagggtttcacttaagttttgaaagtggcgagattgctgcatcagcgcgtcaatcagcgcgcagcgttcggcgtgctgtttatcacgcccctgcacccagctgtagccgagcgtgccgtcagtcaggcgcacggcggcgcgggtcagcgtggcgtcgccggcaaaaaaacgttcgccggtgccgcccatccgcgcctgaatctgtaccaggccagtttcagcggcgcggatcacctcatagtcggcggtgatgtttagcgcgttcaggcgtgctgccagttcagccggttggctgtgcgccagcacggacatccagtgctggcgggtcgcggtatctgcgtgcattcagtgctccatagtgaattcaatcatgtcggcgcgcgtcaggctgacggagtactccgccgggctgctttcaccgtcacggtggttaagggtgcgcacgcacagcagcgggctcatattcgggatttcaagacgctggcactctttggcctgggcgcggcgggcgctgatccgcgtctggctgcggcgcagcgcaattccggtttgctcgcgcagaaaatcgtgcaggctgccgctgtcgaagcgttgcagcgtcggccagagggtgaggtccgcgaagtagtggtcgattaaacagagcgcgacgccgttgacacgacgcagggtgcgcaggtggatgacgttctccccctcggtaatccccagtgcgtcagcgacgtggccggacgcggggcgcaatacgctaagcagtttttcgctggtgggatggctgccctgatccagcagattctggctaaaacgcgcctgggcgttgagcgggtaatcgaacgggcgcatcagcaccagcacgccgacgccctgacggcgctgtacccagcctttttccaccagttggtcgatggcgcggcgcagggtgtggcgattcacctcaaagcgcgctgccagttgctgctcggcgggaagatagtcgccgcagcggtagtgttgacgaagctcctgctcaagttttgcggctatctcttgatagcgtgttgggtagctggtcggatgtgtagacaagtgcatagatatcaatgcctcgcttatcagataaagtgcttacgcaaccgttgagagaggaaatccagcaggctgaccgtgacgatgataagcaccatcagggcgcaggtttgttggaactggaaaccgcgaatcgcttcccacagggtgacgccgatcccgcctgcgccgaccatgccgacgacggtcgccgagcggacgttggattcgaagcgatagagggagtaggagatcagcagtggcatcacctgtggcagcacgccgtagaggatctcttcgagcttgttggcaccggtggcgcgaatgccttccaccgggccgggctcaatcgcttccaccgcttcggaaagcagcttggagagcacgccggtggtgtggataaacagcgccagcacgccagcacgccagcgaacgggccgaggccgacggcgaccacgaacagcatggcgaagaccatttcgttaatggcgcggcaggcgtccatcaggcggcgaacgggctggtaaacccaccacggcaccaggttttcggcgctcatcaggccaaaggggatggagagaaccaccgccagcgcggtgccccagacggcgatttgcagcgtgacggccatttcggtgaggtaatcctgccactggctgaaatcgggcgggaagaagtcggcggcgaacgtcgccatgttgccgccgtctttgatcagcgtaagcggggccatttccgcgccctgccacgagacgaccaacacggcgagtacaacggcccagctcagaagcgagaaccagctgcgcttgggtggggcgatggtgatggtttgcatgtttggctccggtctgtaggccggataaggtgcttgcaccgcatccggcatcaacgcctgcacattgtcggatgcgacgccggggcgtcttatccgacctacgatttactgcaccgctttactcacgctactcatcgcgcttagcgcgttgttcaggcggtccaggtcatccagctgcgcctgaatctcggtggtttttgccagcttgtcctgctcattcagtcctttattgcttttcacgccctgcatctctttaaacagcgcgagctggcgaatcggcaccagttgcaggtcgctggaagcgcggaatggcgcccagcccaggcgttccagcaccgctttttcttccggcgttttgccgtagttcataaagaagtcgtagatcttgtctttggtggtttcggaaagattcttgcgccagacgatcggatcgcctgggatcagcgggctcttccagatcaccttcagttctttcagcttctctggcgcggaggttttcagcttgtcgaggttttcggtgttgttggtggcaacatccacctgcttgttggcgacggccagcgcgttggtttcatgcccggcgttgacggtgcgcttgaagtcgctggcggagatattgtttttggcgaagacgtagtagccggggacgaggaagccagaggtggagttaggatcgccattgccaaaggtgagatctttccgcttcgccagcagatcgttcaggttgttgatcggactgtctttgttgacgatcaacacgctccagtaacccgggcttccatccgccgcgaccgtctgggcgaagacctggccattggcgcgatccaccgcttccatcgcgctcagattgccgtaccaggcgatatccactttattgaagcgcatcccctggataatgcccgcgtagtccggggcaaagaaggcgttgaccttcacgcccagcttcttctccatatcctgcaagaacggcgtccattgcggtttcaggttttgctgactttccgtactaataatgccgaaattcaacgccttttcctgctcttcggcgtgcgccgggcttaacagggtgctgaggctgaacatgctggtgaaggccaggctggcaattatcttagcgttcattcgttttcctcaatgatggggatgtcaggcagctttcgcgttctcttcgacgcggttaatgctgcggtagagatggtcaaaacgttcgttatcaaactgttggctgctgccgtcgtagaagacgtgcccctggcgcagggcgacgatgcgttcgcagtagcgcagggcgtaatccacctgatgcagcgtgacgaccacggtgatgccgtcgttctggttgatgtcgcgcagggtgtccatcacgatgcgcgcactttctgggtccaggctggcgatgggttcatcggccagaatcactttcgcctgctgcatcagcgcacgggcaatcgccacacgttgctgctggccgccggagagggtggaaacgcgctgatgggcaaaatgcaccatgccaacgcgggtcagcgcctgtaacgcgcgctgtttctgctcgccggtgaaccagctaaaacaggtgcgccagaacggcgtgctgccgagcgcgccaatcagcacgttctccagtacgctcaggcggttcaccaggttgaattgttggaatatgtagccggtatgggcgcggcttttgcggatatcgcgggccaggcggccttcgcgctggactgtgcggcccagcagctcgatatggctaccgacagatttatcgccggtaatcaaaccgcttaagtgacgtaaaagggtggattttccggaaccgctcggcccaagcagagccaccatttcaccgtgatgaatgttcagatcaaccgcatgcagcgcctgatgctgattgaaggttttggcgagcttctcgacacggataatcgtttgcatgatgcagcctccctaaaaaagtggctccatcgtggcggattattgtgacgatttggttaattaaaagtgactaacagatgaagagttaacgggaattcgatgacagtgcgggagggcgggcctcccggcgggttattgcgttggttgttgtttgacgacattaatcatccacggtacgccaaatttatcggtgactttgccaaagccatgcgcccagaaagtttcctgccaggccatttcgatttttccgttagcggcaagattgtcaaaccagcgttttccttcttcgacctgttggctatcgagcaccagcgtaaagccggagtagctggcttttccactcggcatggcatcgctcatcatgatgtcgcttccggcaatgcgcacattggcgtgggcgatggcggtatcgggaaattgcattccggaagggcagttctcggcgctgtcctgcgcactttttggcatttcgccgaagctgattttatagagcagttccgcgcccaacgtacgttgataataggcaatcgcgtcggaacagttaccggcaaaagagaggtagggacttaacggcatgatggtgacctcagttaagagaagccagttaagtgtagttcgaaatttatacagatgagaggcggcctgataagacgcgcgagcgtcgcatcaggcagtcggcactgttgccggatgcggcgtaaacgccttatccggcctacggagggtgcgggaatttgtaggcctgataagacgcgcaagcgtcgcatcaggcagtcggcaccattgccggatgcggcgtaaacgccttatccggcctacggagggtgcgggaatttgtaggcctgataagacgcgcaagcgtcgcatcaggcagtcggcaccgttgccggatgcggcgtaaacgccttatccggcctacggatggtgcgggaatttgtaggcctgataagacgcgcaagcgtcgcatcaggcagttggcactgttgccggatgcggcgtaaacgccttatccggcctacggagggtgcgggaatttgtaggcctgataagacgcgcaagcgtcgcatcaggcagtcggcaccgttgccggatgcggcgtaaacgccttatccggcctacggagggtgcgggaatttgtaggcctgataagacgcgcaagcgtcgcatcaggcatctggcaccgttgccggatgcggcgcgagcgccttatccggcttaccgatcacaatacaatcagttctttttcacaaactcagatttcagtttcatcggaccaaaaccgtcgattttgcaatcgatgttatggtcgccttcaaccaggcggatgtttttcactttggtgccaattttcagcatgctagagctacctttcaccttcagatctttaatgatggtaacgctgtcgccgtcagccagcagattgccgttagcatctttaacgatcagctcgtcgctttcctgtgcaggttctgcgtcgttccattcgtaggcacattccgggcagatgtacatgccgttatcttcgtaggtgtattcggagttgcattttgggcagtgtggtaaactcatgtggatttcctcaaaagtcagcagggcaaaagcgccaaaaaacggcagattgccgaaaaaggccgcaattatacacaaaatccctgagtttgtcgggggtactgctgattttagacgacgatcgttttcatttgaaaggaaacgcaaaaagaaaataatctttttgcctctatttattatttaagataatgttaatgctctacttgttctttttttaattcacatgatatttttatctttctgacgttttaaacgtatcagaagacgttatttattctgataaaaaacaacacactaaatataaaattatttcttgcagtaattataaaagccgaaaacagaactcaaaaacaatctggctaaataaaataacaaaatttgctttaaggaagaattttctatgtacacacagaccctgtatgagttaagtcaggaggctgaacgcctgttacagctttctcgccaacagttgcagttactggaaaaaatgcctctctctgtacccggagacgacgcgccacaactggctttaccctggagtcagcctaatatcgccgaacgtcacgcgatgctgaataatgagttgcgtaaaatttcccgactggaaatggtgcttgcaattgtcggtaccatgaaagcagggaaaagtaccaccattaatgccattgttggtacggaggttctgcctaatcgtaatcgcccaatgactgcgctgccgacgcttattcgccatacgcccgggcaaaaggaaccggtactgcattttagtcatgtcgcgccaatcgattgtttaattcaacaattacaacagcgcctgcgtgattgcgatattaagcatctgaccgatgtgctggaaatagataaagatatgcgtgcgcttatgcagcggatcgaaaatggcgtcgctttcgaaaaatattatctgggtgcccagcctatttttcattgtctgaaaagtttgaatgatttagtgcgactggcgaaggcgctggacgtcgattttcctttttctgcttacgccgccattgagcatattcccgtgattgaagtggagtttgtccatctagcggggctggagagttatcccggtcagttgacgttactggatacccccgggccaaatgaagccgggcaaccgcatctgcaaaaaatgcttaaccagcagctggcacgcgccagcgcggtactggcggtgctggattatacgcaactgaaaagcatctccgatgaagaggtccgtgaggcgattttggcggtggggcaaagcgtgccgctgtacgtgctggtcaataagttcgatcaacaggatcgtaacagtgacgacgccgaccaggtgcgggcactgatttccgggacgctgatgaaaggctgtattacgccacagcagatatttccggtgagcagcatgtggggctacctggcgaatcgggcgcgctatgagttagccaacaacggtaagttaccaccgccagagcaacaacgctgggtggaagattttgcccatgccgcgcttggcaggcgctggcgtcatgccgatctggcggacctcgaacatattcgtcatgctgccgatcagttgtgggaagatagcctgttcgcccagccaattcaggcgttgcttcatgccgcttacgctaacgccagcttgtatgctctgcgatctgccgcgcataaactgttgaattacgcgcagcaggcgcgggaatacctggattttcgtgcgcacgggttaaacgtcgcttgtgaacaattgcggcaaaatatccaccagatcgaagaaagtttgcagctattgcaactcaatcaggcgcaggtgagcggcgagattaaacatgaaatcgagctggccctgacctccgccaaccactttctgcgtcaacagcaagatgcgctgaaggtgcagttagccgccttgtttcaggatgatagcgagccgttaagcgagattcgtacccgctgtgagacactgttacagacggcgcagaacaccatcagtcgcgactttacgctgcgttttgccgagcttgaatccaccctttgccgggtgttaaccgatgttattcgccccattgagcaacaagtcaaaatggaattgagcgagagtgggtttcgtcctgggtttcattttcctgtttttcacggcgtagttccccacttcaacactcgccagctgttcagtgaagtcattagccgccaggaagcaacggacgagcagagcacgcgtttaggcgttgtgcgtgagacttttagccgctggttgaatcagcccgactggggacggggaaatgagaaaagtccgacagaaacggttgattacagtgtgttgcaacgagcattaagcgcagaagtcgatctctattgccaacaaatggctaaagttctggcagagcaggtcgatgaatctgttacggcaggcatgaatacttttttcgctgagttcgctagttgtttgacggaattacagacgcgtttacgcgaaagtctggctctgcgtcaacaaaatgaaagcgtggtcaggctgatgcagcagcaattgcagcagactgtgatgactcacggctggatttacaccgacgcccagctgttacgcgatgatattcaaacacttttcacggcagaacgatattgaccaagacgttacttgacggccccggtcgcgtgctggagagcgtttatccccgctttttagtggatctggcgcagggtgatgatgcccgccttccacaagcccatcagcagcagtttcgtgaacgactgatgcaggaacttcttagccgtgtgcagcttcagacatggacgaacggcggcatgttaaatgcgccgcttagcctgcgtctgacattggtggaaaaactggcgagcatgctggatcccggtcatctggcactgacgcagatcgcgcagcatctggcgctgctgcaaaaaatggatcaccgccagcactctgctttcccggagctcccccagcaaattgccgccttgtatgagtggtttagtgcccgttgtcgctggaaggaaaaggcgttaacgcaacgaggcctactggtgcaggcaggtgatcagagcgagcaaatttttacccgctggcgtgctggggcgtataacgcctggagcttgcctgggcgctgttttatcgttctggaggagttgcgctggggggcatttggcgatgcctgccgtctgggaagcccgcaagcggtggcgttgttgctgggtgatttgctcgagaaagcgacacaacatctggcagagagtatcaatgcggcaccgaccacgcgtcactattaccatcagtggtttgcctctagcaccgttccgacgggcggggagcatgctgattttttaagttggctgggaaagtggaccacggcagataaacaacccgtttgctggagtgtgacccaacgctggcaaactgtcgcgctggggatgccacgactctgtagtgcgcagcgtctggcgggggcaatgctcgaggaaatcttctctgtaaatttggcgtaaataatcagttacatcaatgagtcctaaacgaaatccatgtgtgaagttgatcacaaatttaaacactggtagggtaaaaaggtcattaactgcccaattcaggcgtcaactggtttgattgtacattccttaaccggagggtgtaagcaaacccgctacgcttgttacagagattgcatcctgcaattcccgctccccttttgcggccgtcgcgctgatttttctggcgtttgcggaaatgggccaactctgcgaggaaagctatgctgaaaaggaaaaaagtaaaaccgattacccttcgtgatgtcaccattattgatgacggtaaactgcgtaaagccattaccgcagcaagtctgggtaatgcaatggaatggttcgattttggtgtttatggttttgttgcttacgcattaggtaaagtttttttcccgggggctgaccccagcgtgcagatggttgctgcacttgccactttctccgttccctttctgattcgaccgcttggcggactcttctttggtatgttgggcgataaatatggtcgccagaagatcctcgctatcactattgtgattatgagcatcagtacgttctgtattggcttaataccgtcctacgacacgattggtatttgggcaccgattctgctgttgatctgtaagatggcacaaggtttcagcgtcggcggtgaatataccggggcgagcatatttgttgcggaatactcccctgaccgtaaacgtggctttatgggcagctggctggacttcggttctattgccgggtttgtgctgggtgcgggcgtggtggtgttaattagcaccattgtcggcgaagcgaacttcctcgattggggctggcgtattccgttctttatcgctctgccgttagggattatcgggctttacctgcgccatgcgctggaagagactccggcgttccagcagcatgtcgataaactggaacagggcgaccgtgaaggtttgcaggatggcccgaaagtcagctttaaagagattgccactaaatactggcgcagcctgttgacatgtattggtctggtaattgccaccaacgtgacttactacatgttgctgacctatatgccgagttatttgagccataacctgcattactccgaagaccacggggtgctgattattatcgccattatgatcggtatgctgtttgtccagccggtgatgggcttgctgagtgaccgttttggccgtcgtccgtttgtgctacttggtagtgttgccctgtttgtgttggcgatcccggcgtttattctgattaacagtaacgtcatcggcctgatttttgccgggttactgatgctggcggtgatccttaactgctttacgggcgttatggcttctaccttgccagcgatgttcccgacgcatatccgttacagcgcgctggcggcggcatttaatattagcgtgctggttgccggtctgacgccaacgctggcggcctggctggtcgaaagcagccagaatctgatgatgcctgcctattacctgatggtagtggcggtggttggtttaatcaccggcgtaaccatgaaagagacggcaaatcgtccgttgaaaggtgcgacaccggcggcgagtgatatacaggaagcgaaggaaattctcgtcgagcattacgataatatcgagcagaaaatcgatgatattgaccacgagattgccgatttgcaggcgaaacgtacccgcctggtgcagcaacatccgcgaattgatgaataagctgaaacggatggcctgatgtgacgctgtcttatcaggccaattgaactcttaaggttcacttaatctctgacgcgcatactctcctccaggttaacggaggagagtgcaatgaaaaaccgtgtttatgaaagtttaactaccgtgttcagcgtgctggtggtcagcagctttctttatatctggtttgccacgtactgatctttcttcagccgtacccaggcccgcgtgccggaagtctcttgccggttttgcaggaaaaactgcccgtgatgcaactgtgtaatgcggctgacaatacttaaccccagaccaatcccgccataacggctgtccatacgtacaaacgctttactcaactccccgcatttactctcatcaatacctggtccttcatcttcaactgccatgaccgctccgtcatcttcttgcagcttaatcataatgttgctgccttgcgggctgtaacgatgggcgttttctaccaggtttcgcaataacatccgcagcagggttgcatcaccctgaacggtgatgtcggcggcgctctctggcaatagcagggtttgctgtcgctggtcgagcatggtactgagttcgtcatagctggggagaatgacatcttccagcagttttacatgttgataattaccggaagaaaaactctgtccggcacgcgccagttgcagcagctgggagacgctctccatcatctgatcaagccgtgccactaacggtgctacatcaatgtgatgcgttttcgccagcagttccagatgcaaacgcacccccgccagtggcgttcgcagttcgtgcgcgacgtcagcggtaaacaacctttcgttatccagcgtgctggtcaggcgactgaccagatcgtttaacgcgctaaccaccgcttcgatttcgagggtggcgctgtgaatggcaatgggcgttaagttgtcggcggtgcgcgcttccagctctttttgcagctccgccagcgggcgggtgatgcggcgtaccgcctgatagcagataaatagcgtcaggctgaccataaagacgccggggacaatcaggctggcgaccgcctcgcggatctcacgcatgatgtggcgatcgttgttgcgattgtcgcgtagcgcctgctcaaacagctgaatctgctcggtactttcatgccatagccagaagacgctgatcagctcaaacaccaacaaaatggccccgatggtcaatatcagccgttggcgcaggcttattggtcggcgcagaaaatgcatcagattcaattagttttcctcattcgcgaccagcatatagccaaagccgcgcacggtgcggatacgggctttgcccactttgtcgcgcagattgtggatatgcacttccagggtgttggtgctgggttcattgtcccagttatagatgtcgttgtagagaatttcccgatgcaccggactgcctgctttgagcattaaccgactcagcagagcatattctttgggcgtcagaatcaactcttcaccgcccatccatacctgacggcgacccatgttcagcgtcagattgccaacaatcagctcactttcgccctgattattatggcgtcgtagcagggcgcggatacgggcatgtaactcttccagcgcaaaaggcttcaccagatagtcgtcggcaccgacatccagcccggcgattttgtcggtcagcgtatcgcgagcggtgaggatcagtaccggcagggtatattttttctgccggatacgggcgagaaaatgcagtccatcttcgtcgggtaaccctaaatccagtaccaccaggctgtaatgacctgcctcaaggctttgttccgccatccgcgcggttgtcacgctatcgcacgcgtagccttcggtttgcgccgccagaatcagtccctgcaataacagcgtatcgtcttcaacaatcagaattttcattcactcactctcctgcaagtttgcagaatatcatccgcagcctggtaatacttcgtctcaacgccagttaatcccaatagcgtggagaataaattgtcttgactatagtgttgcgtttgcgcctgtttttgcaggcagttctggtcaacctgataccgtttttgataatcctcgctcagccacagcagcatcggcacctgtttttggctatccggggcgatggcataaggcagaccgtgcagatagatgccattttcacctaagctttcaccgtggtcagaaagataaaccaggctggtggtaaatttatcctgatgttctttcagcagattaatcgctttatcaacaatatagtcgacgtaaaccagcgtgttgtcgtaagtgttcaccagttgctctttggtacaggtctggatctcattggtgtcgcaggttggggtaaatttcctgaactgaggcggatagcggttgtaataggtcggaccgtggctgccgatggtgtgtaagacaatcacgccatcaccttgcaggttattgatgtactcttcaagcccgtggaacagcacttcgtcatagcattcgccgttgatgcactgatcaggtagattcagcgcggtgacgttctggtgaggcacgcggtcgcaggcacctttacagccgccatcgttgtcattccacagcacgttgatgcccgctcgctgaatgatatccagcacgccttcctggtgctgtgccagctcttctttgtagtgctcacgcggcatatcgctgaacatgcacggtacactaactgccgttgccgtgccgcaagatgcggtattagggaaatagaccacgttatctttcgccagccgcgggttagtttcacgcgggtagccgttgagggagaagttctccgcccggctggtttcgccgacaatcaggatggtcaaatttttacgtttttcgttctgcattaacgggttgcggtgcgcgtcttcaccaattcgcaccagcggcagatttgccagtcgctgatgggagtaccaactccagctggcaacaatgctgttagaggggcttaaggatttcaccagctctttgttattgcggaacaagctggcgtagtctttataaaacagtgcggcgaccagcaaaatcagtagtacagaaaccagaatattggctccacggaaaagaacactgcgcagacggctggtggcaggtttgatttttatccagcaggcaatcagcgcagcaagcacgccgctgaatcccagcgttaataacatttgcggtgtcatcagcgcataactttctgccggagtggtatcaataatattggcaatcatgctgcggtcgatgacgatgccgtaagtcattatgaaatattgtgcagccgcgccaaccagaataaacaggcaggccagtggtcgattaagccataagaaagagcttagtgtcaggacaatattaatcacgctgaaagcgacgaccggcatgctcaagaaaaccagtacgttatgcaggctatccagcggcagcgcctgcaacacctgtttaaaaaaggcaatattcaggcagatagagatataaaaagcggccaacaatagccaggcgagtaaattcaaagagggtctttttagtaggcgcttcaacatcacggtgtttccatcgaacaaagtgcgcatatgctcgcaaagcaaaattaagccaaccttaagttcttaaggttggcttttatgtttgctggattaaggggaattaatctttgcttattggtgcatctaagggatacgggtttttatgtagccggttgtaattcagcgcatacatggcggtgatgaccatcagggtgacaaaactccacataacctctttcgctccggaccccaccacggcccagatgcagtagaggaaggcaatggtagtaactgccagatatgccgggcgtgctttaccaaagtgaccgtgtccgagcagcagtaacgccgcacaggtgtaaagatatggcaccagtgtaaagatgacgctgacggaagaaaccagaccgaactctttggtcgcgtttggactaatgctgctgagctggaagatggtcatcaaaataccgacgataatcagccccgccactggcgtacccgctttatttacacgggcaaaaatcggtgggaacagtccgtcatcggcagcggctttcgccgtttgacccgccagcaacgtccagccgcccagactacctaagcaacccgcagctgcgcagaaggaaacaatggccccggcggtgtcacccaacgccatccgtgcggcatcaccgaatgggctagcagaaacgcgcagtgcggcattagggatcatccccataatcgcggtggtagaaagtacatagcaaacggcggcaatcaataccccaccaatggtggcgatagggacattgcgtttcgggtttttcaccacacctgcggcaacggaggcactttccacaccgatgaagctccacagcgtaacgttaagggtactttgaattgcaccgaaggtgcccaggccgctgacgttccatgccgccatataggtttcaccacggaaccagaaccagccaaatacggcaatcccgacgatggggatcagcgccagcacggtggcaactgcctgcacacgggtgatcattttcggaccgacaatgttcagcaggacgaagatccacagcaccacgacgcaggtgatggttaataccaatggatctttcagaatcgggaagaagtaacttaaatatcctacgccaatgaccaccatggcgatattgccgatccagcaggccagccagtagaggacgttggtttgataaccgagaaacgggccaaagcagcggcgggcgtaagcgtaagaaccaccaggacttgggtcgaggaagctcattttggcgtataccatgctgagccccagtgcaccgataatcgtcaccaaccatccataaatggcaatcccgccagtagaggccaggtttgcaggtaacagaaaaacaccactccccataatattcccgctcaccatcagggtgacggggattaagcccactttgtgagcatcagcatcgctagacataattaaactcctgcgaaggcgagcttcgtgacaataaattacgtcatatcatacgcctgcattcgatagttgaattattatcgaccgggttatcgctgatgccgttattaatatagctcttcgttaaggttaaaaatcaggcgacagtgcgttctctgtgctgactaacataatgcagcggcgtcataccgtagaagtctttaaagacagaaataaagtagctcgtactgttgtagccgcaggactgacttacctgagagatatttttaccgtccatcattaattcatttacggcataacgcatgcggcaggtggtgattatttggctataactggtgttttcgcttttcaactttttctttaacagacttgggctaagacataaacaactggctaccatactaagattccagtctttgtgaatatcgctttcaataatttgataaacgctgtcacttacacaattacgtaacatatacatcattaaactaacgaattttttactgtcgagaaaacgggatagcaccgtgaataataatgcgcgtgttcgttccttttcactctcagtttctgcgggcatcatgctgtgttgcgcggcaacgcgaaagacgtctggcgtcaggcatggcagggtgagtatgggcgtagcgctacgttgccatactggtatttggctgagatctttattcagaaaccggaggtaatctttgatgatgtcgtgactaatatgagcaaccaaagtgttgttaagagaggagacgtcgataatattattttcacaatttaataacgccatatggttagctttaaggctaataggttctttcccattcacccttatccagacatctttttcagtcaataaaacaatacaaggttggtcgctgcaaatcctcatacatgtactcctgagtgcgaataaaagaccagttctcgctaaagcaaagcgataccgggaaatggttatataattgtatgatgaatataaacatgcataaaaataacgagttttactaatagtacaaatttttatagtaatttctcatgtacatatttttttacaggataaataacaggcaaaaaaaagcgcggggtggggccgcgcaaaaagtatgacatttttgtttgcagcaatttttatgaaaacgttgccatactcaaaaggcctaaggccaggcggcgtaatgttatttaaacaattacgccttcagcggaatagtggttacgctttcacgcacataacgtggtaaataccgtcaataatttcagtcccttcagtttcgtgttcaaatccagggaaatggtggtcccaggattgcaggctgcgtaaataacttacttgcggactgtttttatcgccgaagttttcaccagacagcagcatcgggattcctggcggatacgggataacactgtttgccgcgatgcgtcctggcagattttcaatggataccagttcgacattgttgtcgacaatcgcgttgtacgcttcacgcggggtgacttccgccaccggcaggccggaataggcttcgttcaaccgtgcgccagggttgttttctttcagccaggcaaacatggtgtcacccagatcgtgaatccccatgttcgcgtaagtgtcaggatattgttcaacaagttccggcatcacctgcgccagcggtgtgttggcgtcatagtggcgtttgaaggagcaaagggtgttaaccagagttccccatttcccacgggttacgcccatagagaacaggaacataatttggaagtcagtggtgcgggtaggtacaatgccgtggcgaccaagccaggcagtgaccagcgccgccggaacaccggtttcttccagttcaccatcttcacccattcccggagcaaggatgctgactttaatcgggtcgagcatactccagttatccggaatatctttgaagccgtgccagctttcgcccggatgcattacccagcagtcctgaacggtggtcagcagtttggttggtgcgtcagcaaagtcataggttttgccggtttgtgggtcggtgacgacttctttgttccacggtttgaagaaccagctaccgtcagcggtgaactctttatatagccgcgccatcgcctgacggaaatcaaccgcttcgtcaatcacttcctgtgtcagactcaggccgctgttgccgtccatcatgctcaccgccacgtcgttggatgcgcagatggcatacagcggggaggtggtggcatgcatcatgtaggcctggttgaagcgggagaagttaatcgccccacgaccttcacgtacatgaatataagaagcctgactcagcgcattcagcagtttgtgggtggagtgggtggcgaaaacggtaggaccgttgtgatcgccaggttcgccgcgcatggcatagtgatcggcatagatcgggttgaaacgtgcatagccgtaccaggcttcgtcaaagtgcagacgatcggaggttttttccagcagatcctgcgcttctttagcgttataacacacgccgtcataggtgcagttggtcaccacgcagtaagacggtttttgcccggctttgtctttggtcagcgggctttcactgattttcttctgcaaggtttcaggttgcatttcctgcggatagattggcccgataatgccgtagcggttgcggcttggcaccatatagaccggtttcgcgcctgtcagcatcaaaccttgttcgatggatttatggcagttacggtcaacgaccacgacatcgttatcggtcatgcaagcctgcatgatggtgcggttagagccggaagtaccgacgactacgctccaggagcgatcggcaccaaatacgcgtgcggcatatttttcgctttcgccaaatgcgccagtatggtcaagcaaagaaccgagggaagttcgttcgatgcccatgtcggtgcggaacagattttcaccatagtagtcatggtagaaacgtccggcgggtgttttggtaaaaccaacgccgccctggtggcctggcgctgcccaggaatattcatggatgtcactatatttcatcagcgcgctgaacagtggcggcaacagctgctggcggtagcgggtcatcgcggcaacggcgcgtccggcgataaagtcggcggtatcttccagaatccaggcgaattcatcgacaagctccagcaggtcgcgatccattgcggcgagggctttttcccgatcgcccaacaggaagaccggcacgttttgttggcgctcatgaagcttaccgatcaattgtctgacgttttgatgttcgtccggatgttccatttgatagctgaacatcaggcagtcaatggcttcgttactagagagaatggcaaaaccatcatcaaaggaggtggatttaatcacggtaacattttgctggcttaaagcatctgccagacgctcaacggcgttaccgacccaggtgtcttgatggagaaactcgctttcaacaattaatactttcatcattgcttacccggttatgaaggaatcttcgttgcgggcaagtatcttccggccttttcgggctgtaaagcgcgtgaaaaacaaacatttttgaaatatttagttttataaacaatacgttatgtgattattttaaattattttcactgcttattatcgacggctaaactatttttttggctgatactgatatcgtctttagccgggaaacgtctggcggcgctgttggctaagtttgcggtattgttgcgggctcatgccgacatatttgccgaacgtgctgtaaaaacgactactactacgaaagcctgccgtcagggcaatatcgagaatacttttatcggtatcgctcagtaacgcgcgaacgtggttgatgcgcatcgcggtaatgtactgtttcatcgtcaattgcatgacccgctggaatatccccattgcatagttggcgttaagtttgacgtgctcagccacatcgttgatggtcagcgcctgatcatagttttcggcaataaagcccagcatctggctaacataaaattgcgcatggcggctgacgctgtttttgtgtgtgcggctggttttattgaccagaatcggttcccagccagagaggctaaatcgcttgagcatcaggccaatttcatcaatggcgagctggcgaatttgctcgttcggactgtttaattcctgctgccagcggcgcacttcaaacgggctaagttgctgtgtggccagacttttgatcaccatgccgtgagtgacgtggttaatcaggtctttatccagcggccaggagagaaacagatgcatcggcagattaaaaatcgccatgctctgacaggttccggtatctgttagttggtgcggtgtacaggcccagaacagcgtgatatgaccctgattgatattcactttttcattgttgatcaggtattccacatcgccatcgaaaggcacattcacttcgacctgaccatgccagtggctggtgggcatgatatgcggtgcgcgaaactcaatctccatccgctggtattcgctatacaggctcagcgggctgcgggtctgtttttcgtcgctgctgcacataaacgtatctgtattcatggatggctctctttcctggaatatcagaattatggcaggagtgagggaggatgactgcgagtgggagcacggttttcaccctcttcccagaggggcgaggggactctccgagtatcatgaggccgaaaactctgcttttcaggtaatttattcccataaactcagatttactgctgcttcacgcaggatctgagtttatgggaatgctcaacctggaagccggaggttttctgcagattcgcctgccatgatgaagttattcaagcaagccaggagatctgcatgatgtctgcacccaaaattacatttatcggcgctggtagcacgattttcgttaaaaatattcttggtgatgtgttccatcgcgaggcgctgaaaacggcgcatattgccctgatggacattgaccccacccgcctggaagagagccatattgtggtgcgtaagctgatggatagtgcaggggccagcggcaaaatcacctgccacacccaacagaaagaagccttagaggatgccgattttgtcgtggtggcatttcagattggcggttatgaaccttgcacggtgactgatttcgaggtctgtaagcggcatggtctggaacaaaccattgccgatacgttggggccgggcggtattatgcgcgcgctacgtaccattccgcatctgtggcaaatttgcgaggacatgacggaagtctgccccgatgccaccatgctcaactatgttaacccaatggcgatgaatacctgggcgatgtatgcccgctatccgcatatcaaacaggtcgggctgtgccatagcgtgcagggaacggcggaagagttggcgcgtgacctcaatatcgacccagctacgctgcgttaccgttgcgcaggtatcaaccatatggcgttttacctggagctggagcgcaaaaccgccgacggcagttatgtgaatctctacccggaactgctggcggcttatgaagcagggcaggcaccgaagccgaatattcatggcaatactcgctgccagaatattgtgcgctacgaaatgttcaaaaagctgggctatttcgtcacggaaagcagtgaacattttgctgagtacacaccgtggtttattaagccaggtcgtgaggatttgattgagcgttataaagtaccgctggatgagtacccgaaacgctgcgtcgagcagctggcgaactggcataaagagctggaggagtataaaaaagcctcccggattgatattaaaccgagtcgggaatatgccagcacaatcatgaacgctatctggactggcgagccgagtgtgatttacggcaacgtccgtaacgatggtttgattgataacctgccacaaggatgttgcgtggaagtagcctgtctggttgatgctaatggcattcagccgaccaaagtcggtacgctacctagccatctggccgccctgatgcaaaccaacatcaacgtacagacgctgctgaccgaagctattcttacggaaaatcgcgaccgtgtttaccacgccgcgatgatggacccgcatactgccgccgtgctgggcattgacgaaatatatgctcttgttgacgacctgattgccgcccacggcgactggctgccaggctggttgcaccgttaaaacgcgactaaacgctactgcgccgggggatttattccggcgcacacctctgacgataccaataacagaaggcgggcgttggtaacagcgacccgataccctatgagcatttcaatgactacaaaactcagttatggatttggagcgttcgggaaggattttgcgatcggcattgtgtatatgtacctcatgtattactacaccgatgtcgtcgggctgtctgtgggtttggtcggtactttgtttctggtggcgaggatctgggatgctattaacgatccgattatgggatggattgtaaatgctacgcgaagccgatggggtaagttcaaaccctggatcctgatcggtacgttggcaaactctgtaatcttatttctcctctttagtgcgcatctgtttgaaggtactactcagattgtctttgtttgcgtgacctacatcctctggggcatgacttacaccattatggatattcccttctggagcctggttccaaccatcacgctcgataaacgtgagcgcgaacaactggttccttatccgcgtttttttgccagtctggcaggctttgttacggcaggtgtgacgctaccatttgttaattatgtcggcggtggcgatcggggatttggctttcagatgttcactctggtactgatcgccttttttattgttagtaccatcatcactctgcgcaatgtgcatgaagtctttagcagtgacaatcaaccgtctgctgaaggaagccatctgacacttaaagccatcgttgcgctaatttataaaaacgatcagcttagttgcctcttgggtatggctcttgcttataatgtagccagcaacattattaccggctttgctatctattatttcagttatgttatcggtgatgcggatttgttcccctattatctgagctatgcgggagctgctaacctggtgacgttagtattcttcccacgcttagttaaaagtttatcccgacgcattttatgggccggagcatctattcttccggtgttaagctgtggtgttctcctgttaatggcattaatgagctatcacaacgtcgtcctcattgtgattgcgggtattttgctgaatgtgggaacggcgcttttctgggtattacaggtcatcatggtggcagatatcgttgattacggtgaatataaactgcacgtacgctgtgaaagtatcgcttactccgtgcagactatggtggtgaagggcggtagtgcctttgcggcttttttcattgcggttgtgttagggatgattggctatgtaccgaatgttgaacagtctacgcaagccctattaggtatgcagtttattatgattgctctaccaactctgtttttcatggtaacgctgattctctacttccgtttctatcgcctcaatggtgacacgctgcgcaggatccagatccatctgctggataaatatcgcaaagtaccgcccgagcctgttcatgctgatattccggtcggtgcagtgagtgatgtgaaagcctgacgtggacaatagctaacgaaaatggcctgatgcgatatgtttatcaggccacgtcttaatgtaatgctttggatttgcaaattttgtagaccggataaggaattcacgccgcatccggcatcaacaaagcgcaagttgttatccggttatcaagccaaagcgccgtagctggcggcaatgaaagcgagcgaggaatatcaccgtcgttaatgcgccaagcagcgcgcagaacatatcggattgcgtgtcccactggtcgccctgggtgccgagaaaatcatccgctccctgacccattgccagcgctgcccaccactcgattaattcatacatcgcgcttatcgccagcgccacgcagcagaccaggaacgccaccattttacgtccgcgcacgtacatcccgcgaacgagaatttctcgtgccaccagtgcaggcaccagcccctggaaaaagtgccccagcttgtcatacggattacgactcaaccccagccattcctgcacctcaaaaccaacggggactttcgcgtaggtgtattgtccgccgaccatcaggatgatggcgtgaaggaaaatgagcgtatagagcagcggcgttaacggataacgtctggcggtggcaagcagtagctgcacgacaataatcaccggtgtcacttccatcagccaggtgagtttgtcatgggcgctaatgccggtataaatcaggattaacgttagcgtcagtgcgctggtgttaagaattaacggcttgagtgtgcgggtcatggtgagttcgcaaatcagggaaaatactgactattcaccagcaagcgtgaaattacaatcgcaaaagaggtggccagggggatcacctggcagcatgctgccaggcgctgggccgaagaggttacttagtgcagttcgcgcactgtttgttgacgatttgctggaagaagtcgttacctttgtcatcgaccaggataaacgccgggaaatcttctacttcgattttccagatagcttccatacccagctccggataagcgacgcactccagatgcttgatgctctgctgcgccagtaccgccgccggaccgccgatgctaccgaggtagaagccgccgtgtttatgacacgcgtcggtaacctgctgactgcggttacctttcgccagcatgatcatgctgccgccgtgggattgcagcagatccacgtaggagtccatacggcctgcggtggttgggccaagactaccacttggataaccggcaggggttttcgccggacccgcgtagtagatcgggtgatctttgatgtactgcggaagttctttaccggcgtcaatcagctctttcagcttggcgtgtgcaatatctcggcccacgataatggtgccggtgaggctcaaacgagtggataccgggtattggctaagctgggcgaggatctctttcatcgggcggttaaggtcaactttcaccgcttcgccttcaccggcctggcgcagttcttgtggaatgtactggcctgggttgtgttccagtttttcgatccagataccttcgcggttgattttcgctttaatgttacggtcagcggagcaggagacgcccatgccgaccgggcaggatgcgccgtgacgtggcagacggataacgcgaatgtcgtgcgcgaagtatttaccgccaaactgcgcgccaagaccgagtttctgggcctcttccagcagttcctgttccagctggacatcgcggaacgcctgaccatgttcgttcccttccgtcggcagttcatcgtaatagtgagcgcttgctaacttgacggttttcaggttggtttccgcagacgtaccgccaatcacaaacgcgatatggtacggcgggcaggctgcagtaccgagggtacgcattttctcgacgaggaagtttttcagtttgccgggagtcagcagggctttggtttcctggtagagatacgttttgttggcagagccgccgcctttcgcaacgcaaaggaatttgtactcatcgccatctaccgcgtacaggtcgatttgcgcaggcaggttagtgccggtgttgacctctttgtacatgtccagcgccgcattctgactatagcgcaggttatcttcgatataggtgttatagacgcctttgctcagcgtttcttcatcaccgccgccggtccacacgcgctggccttttttaccgacgatgatcgcggtgccggtatcctggcaggtcggcagcacgcctttggcggcgatttcggagtttcttaagaattgcagcgccacgtacttgtcgttttcgctggcttctggatcgtgaagaatagccgcaacctgtttctggtgtgccgggcggagcataaaagaagcgtcgtgaaaggcttgctgcgccagcagggtcagggcttctggttccactttcaggatggtttcgccgtcgaagtcggcaacgctaacgtaatcggaagtgagtagatagtattcggtattgtctttccccatcgggaaaggtgcctggtagataaagggtttgttactcatagcttccagcctgtaactctgtatttgttattcgaaaatggcgtgccgcgtagtcacgggcggcacgcaaagtgcatttataagaacccgtacatcgcggcgaagatccagccgaagacgcagcttacgctcacaccaatcaaccccggcagaataaagctgtggttgatgacgaagcgaccgatgtgggtggtgccggaacggtcaaactgaatcgctgccagatcgctcggataagtcggcaggatgtaataaccgtagcaagccggtgcactagccacgatgtatgccggatcaacgccgatcgccagcgcgaccggaacaatcgccgccagcgccgcagcctgagagtttacaaacttggaaaccagcagcagaacaatggcataggcccacggatactctttcaccatttcacccagtacgccctgaatttcagacatatgcgcaccgaacatggtttctgccatccatgcgataccgtacaccgccacgatggcgatcataccggaacggaagacttcgtttttactgatagacgcgggattggttttggtcaggataataatcagcgccccggtcagcagcataaacatctgaataaccagtaccatgctcagcggtttgccgccgaaggatggacgcaggtcgctatcagcaccaagaagggcgactacagcgattgccccgaggaaaatccacattgccagccagttgcttttcggcagttttttatccagcagcgtcgcggtatcaccgtaaacatactcacggttttccggtacggagatgaatttctggaactcttcgtctttatccagatctttaccgcggaaccagctgaagataccgatcgccaggataccgattaacgtgcttggaatggtgattgccagcagatcgaggaactcaagatggcgaccatcaaaggtgacattacccagcatcgcaaccagagacacgaccgcaacgctcaccggactggcgataatccccatctgtgcaccgatagaacttgccgccatcggacgttccggacggatgttgttcttaatggcgacgtcgtagatgatcggcagaatggtgtaaaccacatgacccgtaccgcaaagaatggtcagtgtacaggtcacaaacggcgcgacaatactgacatatttcgggttgcggcgcagcagcttctcggcaatttgcagcatgacatcaagaccgccgctagcttgcaaggtcgcgcttgccgccaccaccgcaatgataaccagcatgacatcaactggtggtttacctggctgaaggtggaagacgaagaccagaatgaccagaccgataccgcctaataaacccagcgcgataccaccctttctggcaccataaaacagacatatcagtattatgataagttggatagtaaataacatgtgtgaaccctcgcgataatcctatttaaatttttgctgaatagatcacagtcacgttctgttttgtatgaactgttttcagagcctgactaaatatccgtttggtcgttaccggctttagcaaatacctcacagtgaatattggctgattaaagcagcggcaaatttatgcactgtgataagcggctttttcagagagaaagactctctggcgatgggtttatagtttgtactgcgcagatgttaatgttttgtttgctgttatcttattgatatttatcggtctattttttgttctcagggcagatgtcattaggtttatagattaatctgatctacccatttgtgggtaaaaatacacataatgcgggtgacataatagttaattaacttttgttagcgttttgaaattaaaaacaccgttcacctgaagagatattaatttttagcgatgatggagggataattatatttgatctggcacaagttttactgatgaaggatgtaacttgtgccaggggtattttgcattacggtaataattattacttacagataaccagcgatccgttattggcaatattgtttcagtagactgtagtgttctgcctgaatacggtaacggtaaactggacgccccgtgacgccataatggatactggtgaacaagatgtggcagttgaccagccagatgaggtatttacggcaggaaacacggctaatgttaacctcgttggctagctcgtcggtactaaattcatagtcctgatgcgcgtcaatccactggcacagtgtgcgtaacgtctgcggcgttaagccttttggcaagcgacgaggatcctgttcgttggagctgctgccgtggattagctgatcaagctcggcctggtcataatactgatgtttttccagcgccattttcttttgccgccagccggtgagcgcctcttcaaagcgggaagcctggaagggtttgatcaggtaatccacgacaccgtaatgcaggctatctttaatggttgccgcatcggctgcggaggagatgacaatcacatcacttttgcaacgcgcgttatgcaggacaggcagtaaatcgagcccgttctctttttgcatatagatatcgagcaatatcaggtcgataggcgtatcgctattgaagataatctctttggctttctccagcgtgctggctgttccacagcattgaaagcctgggatttgtgctacgtatcggcgattcagctccgcgaccattgcgtcgtcatcgataattaatacattgatcatctgttgctcctctccccgtcccagggtatctggacaaaaaattgtgtgaaaatcccgggttcgctttccacggcgatgctgccgccgagattttctacctgttgtttgacaagtgctaaaccgacgcctcgctcgcttccttttgtgctgacacctttgtcaaaaatgtgatcgattttatcgggtgcgatccccggtccatcatcattaacttcacagtgcagccagccgtgacggtagtgcaatgttacgctaatttcgcctccgggttccggccctaatgcctccagcgcgttttctatcagatttcccaacgtggtaatcagcgtcgcgacctggtcctcactgccgctgtctggcagctggctttcactgtttaaaatcagcgtatggcctaaatcggtcgcgcggttaatcttgctgattaaaaaaccagcgataaccggagatttgatcttacccagcagagagccaatctcttcctgatagttattggctgttttgagaatgtaatcttccaactgcttataactcttcagatgcaataatccgagaatcacatgcaatttattcataaattcgtgggatcgttcacgaagtgcgtcagcatagttgaccagaccgtcgagtcgctgcatcagtttacgtacttcagttttgtccctgaaggtactaatggcaccgatgataacgccattactgcgcaccggaacggtgttgatcagtaatagccggtctttaatcgtaatctcttcgtcgcggcgcggggtaccgtcgcgtaacacttcgctgacatctaccacctgactccaactgtggcttagcgtgctcagtttctcatcgtcctggctcttacggtaattcagcaattcttgtgcggcatcgttgatcagcgtgacctcgccgcgatcgtccacggcaacgacgccttctttgatagactgcaacatggcctggcgttgctcaaacagcgtggagatttcgtagggttccaggccgaaaaggatttttttcagtaccttaaccagaatgcaggtgccaatcagtccgaccagcatgccaaataatacgctccagataatgctccagcgactgtcattgatctgttgggtcacacggcttaactcaaggccgatcgccaccacgccaatttgtttatgattttcatcgtagatgggggtaaatacgcgtaaagcctgcgccagaaaaccgcgattgatagcgacattttcttcgccattcagcgctttaaggatgtcatcacctttaaatggctgaccaatacgctgggcttcaggatggctgtagcgaagactttgcatatcggtaacgacaataaacagcagatcgttgcgtttgcgtacggcttccgcgatggcctggatgccactctcctgcggttttttctgcaagccctgacggatttccgggctgtcggcgagggtacgcgccactgccagtgccttgttggctagcccatctcgcgtcatatcactgatttggctgaagtaaatcagatgcaccaccaatagcacgctgaacagtaccgcactgaccattaagatcactgtggtactcaatttcatcggacgtttgcgtaacatgcggtagggcaaactatgtctcatcagcttccttgtgtgacaaatttcttaagcattatctctgatgaggcgggtaattcaaagggagtaagaatgattggctatataggggaagagactctggcaacggaaactgccagtgctgtatgaagattccggggctatgcttatagcgataatcatactgatgagagagggaaggtcatggatcaggcgctactggacgggggttatcgctgttataccggcgaaaagatcgatgtctatttcaacactgcgatatgtcagcattctggcaattgcgtacgtggcaacggcaagttatttaatctcaaacgaaagccgtggatcatgccggatgaagtcgacgtcgccactgtggttaaagtgattgatacgtgcccgagcggcgcgctgaaataccgtcataaataagcgagggtaaaatggaaatacgcgaaggccacaataaattttacattaatgacaaacaaggcaagcaaatcgctgaaattgtctttgtgccgaccggagagaatttagcgattatcgaacataccgatgtcgatgaaagcctgaaagggcaagggattggtaaacagctggttgcgaaagtcgtggaaaaaatgcgtcgggaaaaacgaaaaattatcccattatgcccatttgcgaaacatgaatttgataaaacgcgggagtatgatgatattcgcagttgatgggagagtacagagtcacgatatttttcattctctccgcgatgtgatgcaggagagcatctgaagggtagggggatgcacaaagaatgggcagagagcgcgtttttttgtcccaagtcatcccctttactgagcaaaaaaaagaatatctcctatatgagaatcatcaatcggggttaataagttttgcgtccccagagcgtttaatattgataggagtcatattatggaaggtaaaaacaagttcaatacttatgttgtttcttttgattatccaagttcttattccagtgtgttcttaagattaagaagtttgatgtatgatatgaatttctcctctatcgtggctgatgaatatgggataccacgacaattgaatgaaaactccttcgcaataacgacaagcttagccgcaagtgaaatcgaagatttaatcaggctcaaatgcttagacttaccggatattgattttgacctcaacattatgacagttgatgactatttccgtcagttttacaagtaaccaggaaggataagaagaacataaaaaatggcactattctctaaaatattaattttttatgtgattggtgtgaacatatcctttgtcattatctggtttatcagtcatgagaaaacacatattcgtttacttagtgcattcctggtcggaataacctggccaatgagtctgcctgtggcattacttttttctctcttttaagagctgtagttgagtggacccgctggttatcgtgaaacgaagcgtctctcctcaaaactggatttgcggaacgatgaacgaagcagtcgcctgactgcttcgttcattaaagtgaaatttatttctgtgggcgcatcgccgggaagagaataacgtcgcgaatagtatggctgttagtaaacagcataatcattcggtcgataccaatacccagaccagcggttggcggcagaccatattccagcgcagtcacgtaatcttcgtcatagaacatggcttcgtcgtcacctgcagctttagcattaacctgttcctggaaacgttcagcctgatcttctgcgtcgtttaattcgctaaaaccattaccgatttcacgaccaccgatgaagaattcaaaacggtcggtgatttccgggttaacatcattacggcgtgccagcggggacacttctgccggatattccgtaataaaggttggctgaatcagatgtgcttctgccacttcatcaaagatctctgtgacaatacgtcccaacccccagcttttctctaccgtaataccgatagattcagctaatgctttagcagcatcaaaattatccaggtcggccatatcggtttctggacgatattttttgattgcttcgcgcatggtgagtttttcaaacggtttgccgaaatcaaacacatgctcgccataagtgactttagtggtacccagaacctcttgtgccagggtgcggaacagactctctgtcagttcaatcaaatcgtggtaatccgcatacgccatgtagagttccatcattgtgaactcaggattatggcgaacagaaataccttcattacggaagttacggttgatttcgaatacccgttcaaaaccgcctacaaccagacgtttcagatacagctccggcgcgatacgcagatacatatctaaatccagagcattatgatgggtaataaacgggcgagcagatgccccacctggaattacctgcatcatcggggtttctacttccataaagccgcgcgcgaccatgaattgacggatagcggccagaattttactacggacaacaaacgtttgacgggatttatcgttagcgatgaggtccagataacgttgacgataacggacttcctgatcctgcagaccatggaatttatctggtaaaggacgtagtgctttagtcagcaggcgcagctcagtacagtgaatggaaagctcacccgtttgcgtcttaaacagcgtaccgcgggcaccgataatgtcacccagatcccattttttaaactgatcgttataaacaccttctggcaggctatctcttgcaacgtacagttgaatacggccaccgacatcctgcaacgttacaaaggaggctttccccatgatacgacgggtcatcattcggccagcaacgctgacttcaatgtttaaggattccagttcctggttatccttcgcatcaaactcttcgtgcaactggtcagaggtatggtcgcggcgaaaatcattgggaaacgccacaccttgctgacgtagtgccgccagtttttcgcggcgatttctcagttcatcgttaaaatcaatagcctcattggctccccgtgtttcttgttcagacattttggttcctctaaatccagctttcaatttagcgtagataaagagacagatcggtacactgtattatctgcctcgactattagtaactcagtttatcttatcgaaactaacgcttacctcaagttgatatcactaataaataaccatcaaaatggtttaaatgacttattaatctcgatttgttagtgttataaactaaaagttaatttattcataaccaattgtttttacgacagttaatcgttgctctcctgtatcatattcgtcggcgtgctaaacagaaaacgggtagcaaaggccaatacgacgatgatcgcgacacaagccaacgtccactctcccatctgagaaaagaatcgctggtaagctgcaattgccataccgctaatttggctctctgtcgtctgctgtgccacgacgcctgccagccagttggcgaccgcgcctgttgccagcatataaatcccggttaatacgccagacattttcagacgcgtgatttgcgcaatcgccaccgggtcaataaagagttcggcaaagcccattagcgccagcccggatatcatcacgcccatactcgcttgaccgtcagccgctgcatgtcgggcatcaaatgccaacaacataaagccacaagccatcagcagtaagccaaaggcaaacttcagccagacgcgcaatgtactgttgccgcggctttctgggctcgccagccaggccagtacaaccccagcgagcatcaccgcaattgcattcacgctctggaatagtgctgtaggtacttcaatattgaatgcctgacgattcacaaagcgatcgataaacaagctgatggtactgccgccctgttgtgccagtacccagaacaatgtcccgacaaacatcaacaatacaatttgccaaagagcacggcgatgttcggggaatttgatcatcatgcgggcaatgatttgtgcggcaatgaggcaaacgatcgccagcaaatatccggaccagtcgttctccagcagcagagtaaaaaatactggggctaaacagagcatcaccactaaccagctccatactggtaaggcaaatttgacactagtgagcgcttttttatccatactacgtgtggactggaaatgacgatgaccgcttaagaaaatcaacaaaccgataaacatgccgccacccgcaagggcaaagccaacatgccatccataccactgagcagccaggccgcaggcgattggggctgcgatagaaccgatattgcccgcagcatacagcaggctaaaaccgccatcacgtcgatgatcgttctcgtcgtagagctcgccaagcaaacagctgatgttacttttgaataaaccgtagccacaaataatgattgccagcgccagatacaggctaaaggtactatttgtatcaatacccagcaccacatggccaagggtcattaacagcgcgccggcaatcactgcagtgcggttgccgagcaggcggtcggcaagccagccgccgagaataggggtaacgtaaaccagagaagcatatgcgctgaacaggctgatggcatggttatcatcaaaaccaagctgatgggtgagatagagaatgagtaaggcacgcatgccgtaaaaactgaagtactcccagatttggatcgccacgatatagtatatcgcgcgcggctgactgggtgttttcatgtgttctccttatgagcaaaaaagggaagtggcaagccacttcccttgtacgagctaattattttttgctttcttctttcaataccttaacggtatagcggccatcagcctgacggtatgcaccgtgaatatcggtttcaaagcccggatagtgagcgccgatttcacacagcatctgcaggaactccagaaccggacgactttcttcggtgatcatttcacccggcattaccagaggaactcccggcgggtacggaaggatcatattggcgttaatacgacctaccatttcgtcgaggtaaacttcttcggtcataccgtgcagctctttctggaatgcagcatacggagtcattaccatcgtcggcagcacttcaaatgcgcgatacatcagatccggcagattgtggtgaacaatcagtttgtggatattctgagccagttcctgaatacgcatgttttcatagaattcaggatcttcacgatacagagacggcagcatgtttttcacacgcaggttcaggtcgaacgcacgtttaaagtcagtcagagcacgcagcaggctcagtgctttggtcttatcgataccgatgctgaacaggaacagcaggttatacggaccggttttctcaacaacgatgccatgttcgtcgaggtatttcgccacgatgctggccggaataccaaagtcgctcatggtgccgtctttttccatccccggagtcagcagggtgactttgatcgggtcaagatacatgtgctcgttatcgatgtttttgaagccgtgccaggtgctgtcagaacgcagcggccagcattcagtcgtatcgatatgatccggctgccatacatcaaagaaccagccatcagattccgttctcagacgtttgatctctttacggaatttgatcgcacgttcaatagaaccgttgatcagacgcttacctgcattgcctttcatcatcgccgcagcggtttcagtggacgccacgataccgtagtgcggagaagtggtggtgtgcatcatgtaggcttcgttaaaggtttcttcgtttacgtcacctttaacgtggatcatggaagcctgagagaacgccgccagcagtttgtgagtggactgggtttcgtaaatcactttcccttctacacggccaccgctcataccgcatttaccttcgtaaatcggactgaagttggtgtaaggcacccacgcggagtcaaagtggatggatttcacatccagtgttttcttgatgaagtcggtgttgtacagcagaccatcataggtagagttggtaattacagcatgtaccggccaggttgcgtttggtgtttctttcacgcgcttagcaatggtagcgtgctggaattcactctgtgggataccaccaagaataccgtaagcgttacgggtcgggcggaaatagattggcgtaacatcgctcatcatcatcaggtgggtcaggcttttgtggcagttacggtcaatcagaatggtgctgcctgctggagcagagtacataccaacaattttgttcgcagtggaagtaccgttggtcaccatgtagctgcggtctgcgttaaagacgcgagcgatatactgttctgcttctttgtgtggaccactgtgatccagcagagaacccagttcagatacactaatggaaatatcagatttcatggtattcggaccaaagaaatcatagaacaggctacctaccgggcttttctggaatgcagtaccgcccatgtgaccaggagtacagaaagtatatttaccttcacgaacatatttaaacagtgctttagtcagcggaggcagaatagtgttgatatattcgtcagtggtctgcttgatcttattagcaatatcttcagcagcacccagcgcatattcaaagaagctaatctgtaaacgcaggtcattcaggcttacatcgagagtggaatacgtattagcgaacgcgtacaacggcaggttctcgttcattttgctaatttcttcgcacagctcgagattatatttatcccagtcaaaaataacgccgcacagacgcgcattgttttcgatcagttttaataagtcgtcacggtcgttcgggtaaacaatctggaagttcagacgttcaagcgcgcgatgaagttcacggatgggttcttctttaaaataaacccccatgtgattcaatattgcaataacgttcatagtcatatctccaggtaaaaaaggcccctcccaacacatgggacaaaatgaaaggaggagcctcggaaaatacttttaattaatgtgcgttagacgcggtgtggttatccatactgtggctctggcgctcgtgcattttgcgagcgtagaacatcaggataatcaggctgacgatgaaggtacctgccagctcgaaggagcttgcgcccatcagcgcgatgaagcagaacacgcaacccagtacagagcagatcaggctgacaaagttgcggatgttaacgccttcaaaacgaatcaggtcaacgcaagagtagaaatacggcagcatagtcagcagtactgcgataccggtcagttcaccgaacaggtcagatgctttaccaccggcagagttcatcagagtgataaggatcatcagggcagtcattttcactgcagccagcagcagaccttttttcggaataccgttgctgtcgacttcaccataaactttcgggaagttaccgtcgttagcggcacgtacacctgcctggcctaccaacatcatccaggagcccagagaagtcaggcacgcaaaggcggtgaatgcagaaaccagcggcgcagcccagttaccgaggatagtactagcactgattgcaaacggagcaccggaagccgccattacagaagacggatacataccggaaagcacctgagtcgcagcgatgtaaacaatacctgctaaaccagtacccagcatggttgccagcggaacggtacgtttcgggtttttaaccataccagtacttacagctgcggattcaacacccacgaaggcccacaggcagagcagaatacttttaatgatcgcatgaccatcagtggtatccgcagtattccagttagctgcataagttgccgcatcaaaccaatgccagccaacaatagcagtcatcaccacaggaataagaaccagcaccagaccaatagtggttaaacggcttacccaagtaccgccgagcatatttacaaaggtaaatacccagacgatagcaatacaggcgatacccgccggaacaggatcatttaatactgggaagaaggtggaaagataagatacagcggtaataccaatcgccaggttaccaatccagttagcatggtaataaagaacacctgtctgaaaaccaaatgcaggggaaatttctccggcataagcaattgggccaccttgttgcgggttttttgttgccagtcgggcatatacatacgccaggctcattgcaccaataatagagataatccaaccccagatagcaataccaccgatacttgctaggttcgcaggtaataatgcaataccgctccccatcatattaccggcaacaacaccggtacaggcaaatagcccgatcttcttggcagaactcatgctcttctcctaatttcatttttgaatttggagtccgggtcatgatgtataactatttcctgaccagaccaaactggcgataagattactcacgaaaaaaggattaatcctaaagattaggtgaaataacacaaaagtttctgtaagtgagaacttgaggttttttattaacacatcaggatcgcaagttgatatcatgaaaagataaacatttaatgtttacaatggattgcgtgacattctctggttaaatttatgtaataaaaattatgcggcaaataaattgccgcaacatattataccaacaggaacatacaaaaactcaacaacaaatatttccgagcataaatcaacccggagttacttattcactagcaagaaatttgtcgagataaggtacaacataaggaacagaagtctggaatataccattttcaatccagtaaagggtgtttgcccctgggcgtaaattaaaggcggtgagatatgcatcagctgcttcccggttcatccccttcatttcataaaccttgccaagcaacacataatttagccaggacatttcaagatcaatgccagtatttatcgcctggtaagactcatctgttttaccttttaccagagcactgaccgcttttatttgatatataatggacaggttgttcaattccggcagtgtaacaatgttatctatttctgtgttcagtgctgctaattgtttttcatctaaaggatgttgagaatggcgcacgatatcaactaatgctttttctgctctcgcgtaggtaaattctggggaactttgaacaatctcacctaataattcactggcacggttcaaacttttatcatcgccatgcagtaaataatcatgtgcctgataaaaattagttaataacgcaccacgatgcggcaaaattttctggagcgtctcctgcattcgttgtggccacggttggtttaacgctttacttaaactctccagtaaatcattttgaatcgccagctgattaccgttagtgatgacataacgtttatccagcatggtactaccatctgcattgtctaccaattttatgctcataaagcattgttgagcacggtattggcgctgattaacaaacgcaatagataatgttttaccggaactgctcggttcatcaatgttgtagttgattttgtcatgcaccataaaggtggagaaggtgttaagacttgtcgccaccaaatcacccacgcctatcgcgtaagagagctgatacggggaactccagctgttacaacttttatttaccatattaatgtcaatatcgcgtggattgagcaaaatacggcttttgctcataggaagacgtgtatcaagactactaaacgctaccagtgctacacagatacctaagctcaacaggaaaaaaaaccatacccaaaaggtagtgaatcgtttgcttttaactggggattgttcaggtggcgttgcggtgttttgaatgttaagactgtgggagggagaatctgtggcaggaaccgcctctggtatagggggagggctagatagcattatttcctctccctcttcttcgctgtaccagataaccggcaccattaatttatagccgcgctttggtacagtagcgatatagacaggactatcttcatcattatcttttaaactcttacgtagttcactgatactctgcgtcacaacgtgattggtgacaatacttctcttccagacattatcgataagttcatccctgctaagtacttcgccactgtgttgagcaaagaaaaccagaagatcgattaatctcggctcaagggtaagttgacgcccattgcggctaatttggtttatggacggagtaacaagccattcgccaacgcgaactacaggttgttgcataatagaaactcattcgaaaagggaatgatgcaatgataattgccacaacctatttttaccatctatagatgggtttatttacatattattggtgaatgcaagacgttatttttaccagccataaacttcttgattacatagtattacgaaaggattttactgagaaccagaagtaatattccttaccatcaaaattcatcatctttgccaaagaaaaatgttcagaaaataatccatggaaaattgtccggagcacttactattttaatggattgttagtctttgcatgagcaagcgaactgatacatttctctttgttctcattcagaaaatctcatcagtcgccgttcagaccggtgttgtgctttatggatgcgttacgctcctgatgacgtcatttgacgttcaacagcatcacggggccgcacgacatttcacgtcagttagtgctatagctcaggaacaaattttcccgaattgggatatgcccgcaaattgctggtgatgtggggagaatctggttgagttcggtagaattgatttggaggcagaacgcttaaatcgtggcgtcctgaaacgaaaaacggacctccgtggaggtccgtttatatgaatttggtgcccggactcggaatcgaaccaaggacacggggattttcaatcccctgctctaccgactgagctatccgggcaacggggcgcattaaaccgtaatctgcacatctcgtcaacctaatttcagtaaaagcgattcaactgcttaagattgcggcaaatcgcttcttttctgtgtttctgtcaggtcaatgcaccaccctggcggcagcgggcgaagcgcaggatatcttccgccagccgatgtgcagtgtcgacatccgcctggctacgattcaccagcattcggcttaaacagccttccagcaccagttccatctgctttgctaccatcgccggatcgtcaacttccagtgtggttaacagttcgtgggtgaaatcgtaggccgcgcttttttgctgatcggccagttgatgaatagggtggccaggatcgggataaaacgtacaggcagcgataaatagacagcccggatagcggttgtttttaacgcactcgcttaacgcctgataacgtgccagcagcttttgttcggcggtttgcgtttcgtccagcatcagctgacgacgccagacatctatctgttggctaagataacgcagcgcatcgtagaggattgcctctttgtctggccagaagcggcgtagctcgtccagtggataatccacacgttcagcaaccatctccagcgtggtgttggcaatcccttgtaattctaataatttcagggcttctcccagtacatcttcacgttgcacgctattttcctccgtctttcccactgcaagtgtcgttcacggttggcgatcgcgcaaatgtgcgctgaaggtttcagcatccataaagcccgtgacgcgtgcttgtggatgctcctggccttgtccgtcaaaaaagagaattgtcggtaggccaaggacattaagatgctttaacagcgccacatcttgtgcgtcgttggccgtgacgttggcctgaagtaagaccgtgtctgctaacgctttttgcacctgcgggtcgctgaaggtgtatttctcaaactctttacaggcgacgcaccagtcggcataaagatctaacatcaccggtttgcctttggcttcaacgagcgcctgatttaactcatctaccgttttgatttgtgtaaagttgagatgcgtctgagtttgcgcggtatgcgtcgcaccaaatgcccaatcctgaagtgggcgcacgctaaccaatgccgctgccagcagaataatttgcacaatacgcatccagccgcgtttagcctgtaggctggtgataaaggcccagccaaagaatgcgacacccagcgcgctccacaagcgtaatccccatacatcaccaatcactcgctccagcaggaagaccggcagtgcgaggatcacaaaaccaaacgcggttttgacttgttccatccacgggccgcttttcggcagcaagcggttaccaaagacggtaattagcatcagcggcaggcccatgcccaacgcatagagataaagcgtgccgccgcccagccacatgttcccgctttgggcgatatacagcagaatcgcgctaagcggtgcggtggtgcatggactacagatcagtccggcaatcgcccccataacaaacacaccgccaggactgccgccctgttggcgattgctcatcaacgtgagacgtgtttgcaggctagaggggagttgcagggtaaacaagccaaacatactcatcgccagcaaggtaaagacgatggcgaggccaatgagcacgtatgggtgctgtagcgccgcctggaactgtaaccctgcggcggcaaccaccagacccagcgccgtgtaggtcagcgccatcccctgcacataaataaaggtcagcaacaatgctctggcagtggagagccgctgtttaccacccagcacgatgccagaaatcagtgggtacattggcagcacgcatggcgtaaaggcgataccaataccgatcaacaacgcccagagcgcggaaaagggcaattgcgcggtgggctgctcttgctgcggaacagacacaggctgtggcgctgcgttgttggcgaccacttcgcttaacggaacggttttggtttctggcggataacagaaaccggcatcagcacagccctggtaggtgacagttaacgtcgctcccgcactcgcctggttgatggtgacgggaagcgtcagccgatcgcggtaaatctcgcttttgccgtaaaactcatcttcatgccagacgccttgcggcagctgcacgtcggcaattttcgcgtgttccggcgtaatgcggatctgtttacggtagaggtagtaaccgtctttgatctgccaggtcagattaaggtcatgttggttttgctgaaaatcaaaagcaaaggcttgatccgcggggacaaattgactacgtcccggcgcgtcgaataatccggcaaaaacggaagtgctgcaaagtagcaggatcagcgtaaagatgcgttgagccatgagaggtaatctgtgtctccttatgtcagcgtaaagatgcgttgagccaactgaggtaatctgtgtctccgtgtgtaacaggtaaaaccagaagttccggggtttgatatggatgatgagacttcaggcattccagcagtgcctgctggtgagatacggtagtttttaaaatcatctgcacttcgtattcttgctccagcttaccttcccagtaatagagagaggtagcgccggggatcaaggtcgcgcaggccgccagtttttccgccagcactttggcggctaaatcctgggctgtcgcttcatctggtgccgtacatagcaccacgacagacgcggtattgctacttttttcatcaagcataaacacctcgcaagaacagatggaaccgcaagagagaggtcactatacaacggacgggggaaggatgttagtcggcgggaaagaaagcggggcgtgaacgccccgcgattgatcattacagcatgaagctacccagcacgaagccgaagcaaacggccagggcaacacccagagtacccgggatgaagaacggatggttgaagacgaatttaccgatacgggtagtacccgtgtcatccatctgtaccgcagcaaccagcgtcgggtaggtcggcagaatgaacagaccagacaccgcagcgaaagaagcaacagcggtcagcggactaacgttcagtgccagagccatcggcatcagtgcttttgcggttgcagcctgagagtacagcagagcagaagcaaagaagaagatgacggccagcagccacggatgaccctgaatcacttcaccagcggtatctttgatccagtcgatgttgttggaaacgaaagtatcgcccagccacgcaacacccaggatacaaatacaggcgctcatacctgctttgaaggtgctggagttgaggatgttgtcggtatcgactttacagataacggtggtcagagttgcaacgctgagcatgatgatcaggattgcgttggtggtgttcatcagcggtttttcaaccagacccatgcttgggctgttgatgattgcatagataaccacgccaactacgcccagcaggaacagccagacggacgtttttgcaccggatttgatttcaatctgcttttcaccgcgcagttcaaccaggccctcttccagacgcttgcgataaatcggatcgtcagagagtttggagttgaacagcatagtgaccaggaaggacatcaccagaaccgccagcagggtggacgggatgaccacggagagcagatggaggtagctgatgccatgaccttccatcacggaagacatgtaaaccactgccgcactgattgggcttgcggtgatcgcaatctgcgcggataccactgcagtagacagcggacggcaaggtttaacgccttgttccttcgcaacttcagcgataactggcagtgtcgccagagagatgttgccagtaccagcaaagatagtcaggaaataggtcacgatcggtgcgaggatcgtgatgtatttcgggttacggcgcagcagcttttctgtctgatgaaccagatagtccagaccgccagcaacctgcatggcagaaatagcggcgataaccgccatgataatggagatgacatcgaacgggatgttaccgggtttaacgccaatagcggcaagaaccagcacccccaatccgcctgcaaaaccaatacctattccccccaatctggcgcccaagaagatcgccagcaaaactatgatgagttctacaactagcatattagccttccttgttttttaacaagttgatattagattgttatttttaagttactgctcacaagaaaaaaggcacgtcatctgacgtgccttttttatttgtactaccctgtacgattactgttcgctttcatcagtatagcgttttgctttgtaagccgggtgcatcagattctgtacggagaaaatatcgtcaagttccgcttcagtcaacagaccgcgttccagaacgacttcacgtacactcttaccggtttcggcacagattttacccacgatgtcaccgttgtggtgaccgatgaacgggttcaggtaagtaacgataccgatagagttgtaaacgtaaccttcgcacacttctttgttagcagtgatgccgttaatgcatttttccagcaggttgtagcaagcgttggtcagaatgtgaacggattcgaacatggcctggccaatgaccggctccataacgttcaactgcagctgacctgcttctgctgccatggtaacagtggtgtcgttaccgatgactttgaagcatacctggttaaccacttccggaacaaccgggtttactttagctggcatgatggaagagcccgcctgcagttccggcaggttgatctcgttcaggccggcacgtgggccactagagagcaagcgcaggtcgttacagattttggacatcttcacagccaggcgtttcagcgcgccgtgaaccataacataagcgccgcagtcagaggtcgcttcgatcaggtcttcagccggtacgcatgggaagccagtaacttcagccagttttttcactgccagcggagagtactctttcggcgtgttcagaccagtaccgattgctgttgcaccaaggttaacttccagcagcagttcagcggtacgttggatgtttttcacttcttctttcagcaggatgctgaaagcgcggaattcctgaccgagggtcatcggtactgcgtcctgcagctgggtacgacccattttcaggatgtcctggaattcgacagctttacgttcaaagccttcacgcagttggttaatcgcatctaccagcttaatcagggaagagtaaactgcgatacggaaaccggtcgggtaggcgtcgttagtggactgacatttgttaacatggtcgttcgggttcaggtactgatattcacctttttggtgacccatcagttccagaccgatattggccagcacttcgttggtgttcatgtttacggaagtacctgcgccgccctggtagacgtctaccgggaactgatccatgcattttccgttgttcaggacttcatcacatgcggcaatggtggcattcgctacacttttaggaatggtttgcagctctttgtttgccatagctgcggcttttttaaccattaccataccgcgaacaaattcaggaatatcactgattttgttgttgctgatatagaagttttcaatcgctctcagagtgtgaacaccatagtaggcatcagctggaacttccctggtacccaacagatcttcttcgatacgaatgttgttactcatgtgaaccttctttttcaagctgccaatgatttgctttaaacacacagaatatatgtggtttcgaatgtttttcgaccgacgattatcccctgcatcgaccgaatacccgagatcatatgctgcttgaggatttctaccgtaatctggatcactttaagtgtcggtttttaccccttaattattaatttgtgaaatagatcaccgctttgggattactaccaaaaatagttgcgcaaacatcttgaaattttgctaatgaccacaatataagctaaacgcgattcgcaacccattcaggtagccggggttaaccggctgctattacaggagaaacctttgcgctggttaccttttattgccattttcctttatgtctatattgagattagtatctttattcaggttgcccatgtattgggggtattgctgaccctcgtgctggttatattcacgagtgttatcggtatgagtctggtacgtaaccagggctttaagaatttcgtgctgatgcagcaaaaaatggcggcgggtgaaaacccagcggcggagatgattaaaagtgttagcctgatcattgctggtttgctgcttttattaccgggcttttttaccgacttcctcggtcttctacttttattgccgccggtgcaaaagcatctgacagtgaagttgatgccgcatttgcgcttttctcgcatgcctggcggcggttttagcgccgggaccggtggcggtaatacttttgatggtgagtaccagcgaaaggatgatgagcgcgaccgccttgatcataaagacgatcgccaggattaatgtcgaaacgccggattatgtggttatgccattttccggcgtttttcgttttggcagcaacagccataaccccgccagcatgatcagcgcatagagacttttccagccgaccattgccagtaacagaacgcataacagcccgccaaccaccgccagtagtcgataacgtccttgcaataatttacagcctgccagcatgcataacagataaatcataataaagatgccattggcataaataataagagcgtccagattgatctctaaagcatgaatcaccaaagtgctcaccacacagcagccgagcaccgcattgagggcattattcgggatatggcgagaagagaggcgtgccaggtagtggtcaggattatgttgcgcctggctccagaccaggcgggcgaagctctgtatataaatgttgagactggcaaagcaggccagatagccaatcacgcaggcaatccataacgctcctacaccgaacaactgcactacaatttttggaaggcttgctgccgccgccattttttcaccataggcgtcgaagtgtaagacgactaccgtacagccccagtagactaatcctgccagcagcagaccaatcatcaaagcacgaggaaaatcacgctctggatttttaaattcgctggcgagatgggcaaatgcctccagaccgacaaaacaccagaacatcacacttaacgcagcaaataacccggtaagttcgatattaccaggtgccggaaaggggatattcgcaggtttgatatcgcccgcccaccagatagcgacaatcagcgcgacgataagtccggcaataacggtttgtagattagcactggaactggcaccgcgagtaccgatataccacaccagcgccagcgtaccgagttctgccaacaacagttgccagctatgccagccaaacatcgcctggccgaacccggcggcaatttgtagtgcggcaggcaaacccacgggaatgacgcttaaaaacagccagccggtgactcgctcaagccggctaccaaacgccataccgacgaagtgcgcgacgccgcctgcgctgggatagtggcgacccagaatcgcaaacacaatcgcaatcgggaacactaagataatcaaaacgggccacgcccacaggctgttattgcccgctaccagcgcagctaacgcaggaacggcaaacacgccagtgcctaataaactcgtgcttagcaggccaatgccctgggccagccccagttcttgtttgagtccactcatgggttgatgtccgattgcgcccaaattttgggcaactgcgtagattttcgatggtagcacaatcagattcgcttatgacggcgatgaagaaattgcgatgaaatgtgaggtgaatcagggttttcacccgattttgtgctgatcagaattttttttctttttcccccttgaaggggcgaagcctcatccccatttctctggtcaccagccgggaaaccacgtaagctccggcgtcacccataacagatacggactttctcaaaggagagttatcaatgaatattcgtccattgcatgatcgcgtgatcgtcaagcgtaaagaagttgaaactaaatctgctggcggcatcgttctgaccggctctgcagcggctaaatccacccgcggcgaagtgctggctgtcggcaatggccgtatccttgaaaatggcgaagtgaagccgctggatgtgaaagttggcgacatcgttattttcaacgatggctacggtgtgaaatctgagaagatcgacaatgaagaagtgttgatcatgtccgaaagcgacattctggcaattgttgaagcgtaatccgcgcacgacactgaacatacgaatttaaggaataaagataatggcagctaaagacgtaaaattcggtaacgacgctcgtgtgaaaatgctgcgcggcgtaaacgtactggcagatgcagtgaaagttaccctcggtccaaaaggccgtaacgtagttctggataaatctttcggtgcaccgaccatcaccaaagatggtgtttccgttgctcgtgaaatcgaactggaagacaagttcgaaaatatgggtgcgcagatggtgaaagaagttgcctctaaagcaaacgacgctgcaggcgacggtaccaccactgcaaccgtactggctcaggctatcatcactgaaggtctgaaagctgttgctgcgggcatgaacccgatggacctgaaacgtggtatcgacaaagcggttaccgctgcagttgaagaactgaaagcgctgtccgtaccatgctctgactctaaagcgattgctcaggttggtaccatctccgctaactccgacgaaaccgtaggtaaactgatcgctgaagcgatggacaaagtcggtaaagaaggcgttatcaccgttgaagacggtaccggtctgcaggacgaactggacgtggttgaaggtatgcagttcgaccgtggctacctgtctccttacttcatcaacaagccggaaactggcgcagtagaactggaaagcccgttcatcctgctggctgacaagaaaatctccaacatccgcgaaatgctgccggttctggaagctgttgccaaagcaggcaaaccgctgctgatcatcgctgaagatgtagaaggcgaagcgctggcaactctggttgttaacaccatgcgtggcatcgtgaaagtcgctgcggttaaagcaccgggcttcggcgatcgtcgtaaagctatgctgcaggatatcgcaaccctgactggcggtaccgtgatctctgaagagatcggtatggagctggaaaaagcaaccctggaagacctgggtcaggctaaacgtgttgtgatcaacaaagacaccaccactatcatcgatggcgtgggtgaagaagctgcaatccagggccgtgttgctcagatccgtcagcagattgaagaagcaacttctgactacgaccgtgaaaaactgcaggaacgcgtagcgaaactggcaggcggcgttgcagttatcaaagtgggtgctgctaccgaagttgaaatgaaagagaaaaaagcacgcgttgaagatgccctgcacgcgacccgtgctgcggtagaagaaggcgtggttgctggtggtggtgttgcgctgatccgcgtagcgtctaaactggctgacctgcgtggtcagaacgaagaccagaacgtgggtatcaaagttgcactgcgtgcaatggaagctccgctgcgtcagatcgtattgaactgcggcgaagaaccgtctgttgttgctaacaccgttaaaggcggcgacggcaactacggttacaacgcagcaaccgaagaatacggcaacatgatcgacatgggtatcctggatccaaccaaagtaactcgttctgctctgcagtacgcagcttctgtggctggcctgatgatcaccaccgaatgcatggttaccgacctgccgaaaaacgatgcagctgacttaggcgctgctggcggtatgggcggcatgggtggcatgggcggcatgatgtaattgccctgcacctcgcagaaataaacaaacccccgggcagaaatgtctgggggtttttcttttggtcatctttctagtataagattcagacacggacgacgcgagtggcgtccagctcattgattatggggaataacatgcacgtaaaatacttagcagggattgtcggtgccgcgctactgatggcgggttgtagctccagcaacgaattgagtgctgccggtcagagtgtacgcattgtggacgagcagccaggcgcagagtgccagctgattggtactgcgacaggtaagcaaagcaactggctttccgggcaacacggagaagaaggcggttctatgcgcggcgcagcaaacgatctgcgcaaccaggcggctgcaatgggcggtaacgtgatttatggcatcagtagcccgagccagggaatgttgtccagttttgtcccgacggatagccagattatcggtcaggtttataagtgcccgaactgatgtgatccagaggctgggtgacaaacgtataattgcctgatgcgcttcgcttatcaggcctacataaggcattgcaactgattgaatgcttgagaatttgtaggccggataaggcgtttacgccgcatccggcatgaccaacgatcacgttatcagtcatttcaggctggatggctccagcctcgcattagcaaagatgagattatttcgcctgtggtgcagttttgctggtggattgaacacgtaagtgatgcagcgcgcgtaagcattgatcctgggttagcggttgggcgttattcgccgctacggtgcgaacatagacctgacatggcacacccgcgagttttttcagtcgtgggctgaaatcaagcattcggcgagtgatcgcttctatttctttacccggcgttgcttcacgcgttttcaccactgcgccgctaaattgttctttgccactttcatctttaaagcggtaaagcaccgccagataatggtcgaacaagttatgtttccattccggttgggaataggtgtcatattccagattgccattgtcctggcagtcaacgtcgtataacggcaggaaatctaacagactggtaatacgtaatgccagttcacgcatttccgcattattaattgcatgaatgattgctcgcgccagcatttcaatctgcaactcattgacgactaactcacatttgctaccgtcatgtagcgttaatacgaaggtaagattttcgccttgattatcggtaagttccagcgtgttaacccgacgattaatatcggcatttttaagctcatcaaccagaatttctgggatgttttctgccattttcttaatgactttatcgcgagcttgctcatactgaaggtgtgcagcagcatccagtttatgcttttgatgcagacgactttccagcgcaatcagcaggtcgcgcagttccatgacagacataaagaacaagctttctttattgcgaggttctttaattttcagcgccagtgcaatgaaattattactcttgcgaataacaccggtattaacacccttgatgcttatggccatgtaggttctccctaaccatttctcaattaaataattaattttaatttataagccagataaatgggcttggtagtaatagttgttaaaataacataaatagccgtactcactctatataaacagaaaagaaaggttaattattggtgttagctatataaaaagtaacaacagcaatgcatatgaataattaaaggttatgcaacgggcaaagattaaacttcccagtttaatgacaggttgctgtacttgcgtttgttgctcttgccggatgcagcgtaaacgccttatccggcctacagttcattgcaaatccattcaatttcaatgcacgatgtaggcctgataagcgtagcgaatcaggcaattttaatgtttaacttccctgtttaatcagttactgctggcgtagctggagatccagcggcgttttgctgggttcgccgccaatttctcgcgccagtttcggcaccagatatccgctcaccagtgtcagcaactcacgcataatctgccgtgcttcgtcatcactcaccataaaatgcgccgcgccctgtactttatcgagcacatgcaggtaatacggcattacgccggcatcgaacaacgcattactcaggtttgccagcgtttgtgcgttatcgttcacatcacgtaacagaacgctctggttcagcaaagtaacgcctacccggcgcaacttagccatcgcctgacggaatgtttcatctacctcattggcatggttgatgtgattcaccagcaagatttgcagcgtagaacgggcaaagcattcaaccagcgcctcggtgatacgtgccgggatcacaatcggcagacggctgtgaatccgcagacgttttatatgcgggatggcttccagttgtgtgagcaaccagtccagctcgtgatctttcgccatcagcggatcgccgccggagaaaatcatctcgtccagttccggatgcgcagcaacatactcaagtgcagtttgccagttacgcttgttgccctgattttcggcataggggaagtgacgacggaagcaatagcggcaatttaccgcgcagccgcctttgaccagcaaaagcgcccggttgtggtatttatgcaacaaaccaggcactacgctgtgctgttcttccagtgggtcggtggagaatccgggcgcgatgacaaactcatcttggctggtaagtacctgacgcaaaagaggatcgtccggattgcctttctccatgcgatcgataaaactgcggggcacacgcagggcaaaaagctttttggcgctgcgtccggctaacagtttttcctccgcgtctatattcaaaagacgcagaagttcatcaggatcggtcacaacatcggcaagttgcgttaaccaatcttctctggatggggtatttagggttacaatatgcgccattttgtggcttagctaccaattaacaaatttcagagggccttatggcaacgtactatagcaacgattttcgtgctggtcttaaaatcatgttagacggcgaaccttacgcggttgaagcgagtgaattcgtaaaaccgggtaaaggccaggcatttgctcgcgttaaactgcgtcgtctgctgaccggtactcgcgtagaaaaaaccttcaaatctactgattccgctgaaggcgctgatgttgtcgatatgaacctgacttacctgtacaacgacggtgagttctggcacttcatgaacaacgaaactttcgagcagctgtctgctgatgcaaaagcaattggtgacaacgctaaatggctgctggatcaggcagagtgtatcgtaactctgtggaatggtcagccgatctccgttactccgccgaacttcgttgaactggaaatcgttgataccgatccgggcctgaaaggtgataccgcaggtactggtggcaaaccggctaccctgtctactggcgctgtggttaaagttccgctgtttgtacaaatcggcgaagtcatcaaagtggatacccgctctggtgaatacgtctctcgcgtgaagtaatgcggttgtggtgcggcctgcaggctgcaccatcacttattcaggtcagagatgatgaaacgccttatcgttcttgttttgcttgccagcacgctgctcacgggctgtaacaccgctcgcggtttcggcgaagacatcaaacatctcggcaactccatctctcgcgctgccagctaatttttcttctcttccgaaaaatcatcagattcccatcatttttggcgatgttgtctattattaatttgctataggcaaacataaataacattacctaaaaggaagacgttatggtgaagaagacaattgcagcgatcttttctgttctggtgcttagtacagtattaactgcctgcaacaccacgcgtggcgttggtgaagacatttctgatggcggtaacgcgatttctggcgcagcaacgaaagcgcagcaataagcaataacggtacgacagctgtgtcgtgccgtttgttttttctgcgatagtcacaaaggtaatagttgaaattcccctgccacctggcaaaatatccgttcaaccatcagctttgcaggacgacctgcaaacgcctcttttcaccggggacggccccaattctccggagcctgatatgtcctggattatcttagttattgctggtctgctggaagtggtatgggccgttggcctgaaatatacccacggctttagtcgtttgacgccgagtgttattactgtgacggcgatgattgtcagtatggcgctacttgcctgggcgatgaaaagcttaccagtagggacggcttatgccgtgtggacgggtattggcgcagtcggcgcggccataaccggcattgtgctgctcggtgagtccgctaacccgatgcgcctggcgagtctggcgttaatcgtattggggattattggtctgaaactcagcactcattaactaccaggctgctgtacccaaataaatttactgacatcaaacccttcccgggtcgcgactgccagcatctcctgtttcacttcgtcagaaatggttggcgtgcgggagagtatccacaggtagtcgcggtccgggccgcaaaccagcgcatggcggtattcccgatcgagtgcaataacgttataaccgccatagaaaggaccaaagaaactcactttcagcgcagcgcgagttggtgcgccggtaaagtacgctttcccttcactctgctgccacattcctctgtcagggttatagcctttattaatgacattcaggccgccgtcatcacgcaggctgtatgttgcggtgactttttccagtccacgttcaaagcggtgatcaaaacgggcaatctcataccaggtaccgagataacgtttggcgtcgaaattatttactacggtcacgccacgcggcggcgtaggagaactgcaggcaacgaccagaaatgcagctgtcgctgcggcaacgagagggagcaggcgcataaatgtttccttactggtttttttctaagtgtagatgacagcaaggaaaagcggagaaaaggtccgaaaattcggacccgatggaattttactgtagagcgttaagaatctgccaggcggcgtcgactctcgctggattgggatagtttttgtttgccagcatcacgatacccagctctttttctggaataaacgcgacatagctaccaaatccgccggtcgcccctgttttatgtacccaacttgcgcgtactgcaggagttgggggcgtaatcgcttttacggggcgtgctgccagtgcaattttattgtcactgccgttaatgatgctgtcaggatttaccggccagtccagcatttcccagcccaggccctgatacatatcgccggtttgccagtagcgagattgtgccagttgtatcccttgttgaagcgttttctcattgatatcaaggggttttaaattgctttgcacccagcgggccatatcttcaatggtgctcttcacaccataagcttcagcatctaacgccccagggctaacatgcactgccttaccttcgcgatatccccaggcgtaattcttttcttctgcgggcggtacattaatccacgtatggttgagtttgagtggctggaagacacgagtttgcatcgcctgctcaaaactcaaaccagacggcttcacagccagtgcgccgaacaaaccgatactggagttggcatacagacgttgtgttcctggagcccatgcaggctgccagttttgatagaagcgcagcaagtcgctactggatttcacctcatccggcacctgcaatggcaggccgccagcagtgtaggttgcgagatgtaatagtgtgatcccattccactgtttagcggtaagttcaggccagtattttgttgtgggatcgcttaacttgatttcccctcgagcaatagcgtcgccaccaagcacgccagtaaatgttttgctgacgctacctaactcaaacaacgtttgctgtgtgacgggctgctttttggcgatgtccgcatagccccaggtaaagtaataaggtttaccctgataaattaccgccaccgccatacccgggatcttttgttgctctataagcggggtaattgtgcgatgcacaatatcgttgatttgttgaggggcagcaaatgtggagcaagaggcggtaattaataaggcgcagagcgtcgttttgaacatagggtctggtttccatacaaaacggcccgccataggcgggccggatttacattggcgatgcgttagattgtaacgacaccaatcagcgtgacaactgtcaggatagcagccagaccgtagaaaacccatttgcccgcaggtacgtggattttcagatcgtgcatcgcgtggtgcatacggtgtaaaccacaccacagcggcagaacgatcatcaggaacaggaatacgcgaccaatgaagctctgcgcgaacgccagaacgcgctcgtagctcagcgcatcacccggaaacaaccccagtggcagcagaatacccaccagcaggatcatcaccggcgcaatgatggcgctccacataccaccggccccgaagaggccccagaataccggttcgtcagaacgctttggatttggattaatcatctcaggctccttaccagtacagggcaacaaacaggattacgatggtggcaaccacagttaccgcccagagacttttgataattggctctggtcccattttttcgtcttttacaatgatattggccgctttcggtgccagttcaaaccaggttttggtgtgcagcagagctgccgccagagtgatcaggttaatgatcacgataaccgggttttgtaaaaagtcgacgaatcccgcccaggcttccgggccatttttcagggcaaacagcccgaaaatcagttcaatgctgaaccacacagccggaaccgccgtgccttcgcgcagcatgtaaaagcgataaaacggcaattttttccaccaggtggacgtcattggccgtacatacggtttacgtttagtcgtcatgttgcactccttagcgtggtttcagggtcgcgataagaaagtctttgctactttctactttgccctgctgaatggccgcagccggatcgacgtgtttcgggcagacttcggagcagtagcccacgaaagtacagctccatacgccgttctggctgttcaactgcgccatacgctccttcttaccgtggtcgcggctatcttcgttataacgatgcgccagcgtaatggcagccggaccgatgaactctgggttcaggccaaactgcgggcacgcggcgtagcacaaaccacagttgatgcaaccggagaactggtgatacttcgccatctgcgccggggtctggatgttagtaccctgatccgcggtgcgggagttgccgatgatgtacggtttgatcgcttccagactttcgatgaagtgggtcatatcgaccaccagatcgcgttcaatcgggaagttagctaacgcttcaaccttcataccgtcggtgtaatcacgcaggaaggttttacatgccagttttggcacgttgttaaccatcatgccgcaggaaccacaaatcgccatacggcaggaccagcggtagctcaggtccggtgccaggttgtctttgatgtagcccagcgcatccagtaaactggtagttgcgtcataaggcacttcatagaatgcgctatgcggtgcggtatcgacttccgggttatagcgcaccacctcaattttcaggtttttcatctcagccattcgccttctccttcttattggctgcttccgccttatcggctgcatccgcttcgccaccgtaaacgcgtttagctggcggcagcgtagtaatcttcacgtcgctgtactccaggcgagtcgtgccatcagcatcgcggaaggcgagggtgtgtttgaggaagttgacgtcgtcacgctcggtgcaaccttcgtccagacgctggtgcgcgccgcgggactctttacgtgccattgcggagtgcgccatacattcagcaacgttcagaccgtggcccagttcaatggtgtagagcaggtcggtgttgaacacgctggaagtgtcggtgatgcgcacgcgcttgaagcgttcctgcagctctgccagcttgtcgatggttttctgcatcagttccggcgtacggtagataccgcagccttcttccatagccaggcccatttcgtcgcggatcttcgcccagttttcgccgccatcctggttaaccagatctttcagacgttgttcaacgccagctgcctgcgcttcaattgccgcttcgttgccattaccggcagttgctgcacgctctgtcgcttgttcaccggccagacggccgaagaccaccagttccgccagggagttagaacccagacggtttgcaccgtgcagaccaacagaggaacattcacccacggcgaacagacctttaatgcgggtttcacagttctgatcggtttcgataccgcccatggtgtagtgtgcggtcggacgtaccggaatcggttctttaaccggatcgacgccaacgtacgctttcgccagttcgcagatgaacggcagacgttcatgcagttttttctcgccgaggtgacgcaagtcgagataaaccacatcgccacgcggcgtggagatggtgttgcctttacgccattcgtgccagaaggcctgagagactttgtcgcgtggacccagttccatatatttgtttttcggctcgcccagcggagtttccgggcccatgccgtaatcttgcagataacggtagccatttttgttgaccagaataccgccttcaccgcggcaaccttcggtcatcaggataccggaacctggcagaccggttgggtgatactgaacgaattccatgtcacgcagcggaacgccgtggcttagcgccatacccataccgtcaccggtaacgatgccgccgttggtgttgtaacgataaacgcgacccgcaccgccagtagccataacgaccgcgttagcacggatctgcaccagcgtgccttccatcatgttcattgctaccaggccgcgaacatgaccatcatcaaccagaatatccagcacgaaatgttcgtcaaaacgctggatctgcgggaattgcagagaggtctggaacagcgtgtgcagcatatggaagccggtcttatcggcggcgaaccaggtgcgctcgattttcatgccgccgaagcgacgtacgttgacgctaccatccgggcgacggctccatgggcatccccacagttccagttgggtcatttcggttgggcagtggtggacgaaataatccacgacatcctgctcacacaaccagtcgccacccgctactgtatcgtgaaagtgatattcgaagctgtcatgatcctgcgcgacagcggcggagcccccttctgcagcaacggtatggctacgcatcgggtatactttactgattagtgcgatttttgcattcggatttgcctgcgcggcagcaattgcagcacgtaatcccgcgccaccggcgcctacaatggcaagatcggcttgaaaggtttgcacgacattcctccagattgtttttatcccacagccacgtacttcagggtaagtacctgaaagttacggtctgcgaacgctattccactgctcctttataggtacaacagtatagtctgatggataagtctgaaatttgacgagatcgatttttttagtgcgcaagagggctaaattatcactgaagatgattaatttaattactaaaccatcagatcgtgctttttttagtcactgcccaccgctgtttgattcctgcgtaaaatttgtctcgccgtcgcgttgcgagtagacttcgtgcccttgtcaaaaactggagatttaactatgagcgaaacggcatcctggcagccgagcgcatccattcctaacttattaaaacgcgcggcgattatggcggagatccgtcgtttctttgccgatcgtggagtgctggaggtggagacgccttgtatgagccaggcgacggtaaccgatattcatttggtcccgtttgagacacgtttcgttggccccgggcatagccaggggatgaatctctggttaatgaccagcccggaataccatatgaaacgcctgctggttgccggttgtgggccggtattccagctgtgccgcagcttccgtaatgaagagatggggcgttatcacaaccctgagttcactatgctggagtggtatcgaccgcactatgatatgtaccggttgatgaacgaggtggacgatctcttacaacaggtgctggactgcccggcagcagaaagcctttcttatcaacaagctttcttgcgttatctggaaattgacccgctctctgccgacaaaacgcaactgcgggaagtcgcagcgaaactggatttgagcaatgttgctgataccgaagaagaccgcgacacgctgctacaattgctgtttacctttggcgtagagccaaatattggcaaagaaaaaccgacctttgtgtaccactttccagccagccaggcaagtctggcgcaaatcagtaccgaagatcatcgggtcgctgaacgctttgaggtttattataaaggtattgagctggcgaatggtttccatgaattgacggatgcccgtgagcagcaacaacgctttgaacaagataaccgtaagcgcgcggcgcgcggtttgccgcagcaccccattgaccagaatctgattgaagccttgaaagtcggtatgcctgactgttccggcgtggcattaggtgttgatcgtctggtgatgttggcgctgggcgcggagacactggctgaagtcatcgcctttagcgttgaccgggcataattctgaaaaattactgaattaacagcgaagaatggcgtgataagcgccattctgtagcatatgttttcatttttccgttaaaggccacaatttaagactggatatttgatatcatccaggtatcaattctgtattggtttttacgctgcctgctcaatgttgcgcagtgcagttcagtgggcacgtgttatacacgcgctgaaatgaaggatggtttcatgcctcacacgataaaaaagatgagtctgataggactcatattgatgatctttacttccgtatttggatttgccaatagcccaagcgcttattacttaatgggttatagtgcgattcccttttatatattttctgcattgttattctttattccattcgccttaatgatggctgaaatgggagctgcttatcgcaaagaagaaggcggtatctattcctggatgaataatagtgtcggaccacgttttgccttcattggtacgtttatgtggttttcctcttatatcatctggatggtgagtacctccgcgaaagtttgggtaccgttcagtacattcctctatggtagcgacatgacccagcactggcgtattgccggactggagcctacgcaggtggttggtctgctggctgtggcatggatgattctggtcaccgtcgttgcttctaaggggattaataaaattgcccgcattactgcggtgggcggtattgcagtaatgtgtctgaatttagtattgctgttagtaagcattactattttgttattaaatggtgggcatttcgcgcaggatattaatttccttgcaagtccgaacccgggttatcagtccggtctggcaatgctaagctttgtggtatttgccatttttgcctatggcggaattgaagcggttggtggtctggtcgataaaacggaaaatccagaaaagaactttgccaaaggtattgtttttgccgctattgttattagtatcggttatagcctggcaatatttttatggggcgtcagcacaaactggcagcaggtattaagtaatggttccgttaacctcggcaatattacctatgtgctgatgaagagccttgggatgacgctgggtaatgcactgcatttgagtcctgaagcgagtttgagcctgggcgtatggtttgcgcgtattactggacttagcatgttcctcgcctataccggtgcgttctttacgctttgctatagtccgttgaaagccatcatccaggggacgccgaaagcattgtggccggaaccgatgacgcgcctgaatgcgatggggatgccgtctatcgccatgtggatgcagtgcgggttggttactgtcttcatcctgctggttagctttggtggcggtaccgcaagcgcgttctttaacaagctgacgctgatggcgaacgtgtctatgacgcttccttacctgttcctcgcgctggctttcccgttctttaaagcacgtcaggatctcgacagaccgtttgtgattttcaaaacgcatttgagcgcaatgattgcgacagtggttgtcgtactggtggtgacatttgcgaacgtcttcaccatcattcaacctgtggttgaagccggagactgggacagcacattgtggatgattggcggccctgtcttcttcagcctgttagcgatggcgatttaccagaactattgcagcagagtggcaaaaaatccgcagtgggcggtggaataacccgatgccctatcgtctacctgacgatagggcgtaaagacaggaaatgttatggatgacaccagccgggacccggcaataaccgaagatgaaatcagggcgctgcaattttctgccggggatgtagcggaaatagagcagacgattctctcttttgtcgatgcctgccacacccgtaaagtggcgatggtggtgggtagcaccattaacaccctcaaagatcgcgatggtaaacggtggggaaacctgccggatatttattgcgcttatcttatccgatgtctggtttttcgcggggaattagtgggatacggcgatttgtttcgtatgcgctatagcgaaattaagcgaccggttaccttatgagtgcgcgcatgtttgtcttatgctgcatctggtttattgtggcgttcctctggataaccatcacttccgcgctggacaaagagtggatgattgatggacgcgggattaacaacgtctgcgatgtgttgatgtatctcgaagaagacgatacccgtgatgttggtgtgataatgacgttaccgctctttttcccttttctctggttcgctttgtggcgaaaaaaacgcggctggtttatgtacgccaccgcgctggctattttcggctactggctgtggcagttttttctgcgctatcagttttgtttgtgagccggattggttcatccggcacacaaacttacaaacttcccgcctgacgacctttgcccgcagacgtcagcgttctccccgtttgtttaccgttgaggctttccagacgcatctggaagggcgggaatggcatatcgataccgtgggcatggaagccagccagaatcagctggtggatctcatggcgtagcggcatacggtgacccatctcagcggcgtaaatacgcagctcgaaaatctgaatcccctgttgcagatccaccaggaagacttccggtgccgggttgtcgatcaccaggctgcagcgacgcgctgcggtgagcaggatttccgtcacttcttcgctattggcatcggcaggggccggtatcgtcaacaccacgcgcgtgacgctgtcagagaggctccagttgataaactgctcggtaataaacgccttgttcggcacgattatctctttacggtcccagtcgctgatggtggtggcgcgggtgttaattttcgtcacgctaccggtgagatcgcgaattgtcaccgtatcgccaatgcgaatcggtttttcgaacaggataatcagaccagagataaagttggcgaaaatttcctgcaaaccaaaaccgagaccaacaccgagcgcggcaaccagccactgcaatttgctccactcaataccaatcatactgaagccgaccagcccgccaatcagcatcagcagatatttggtgatggtggtgatggcgtaacccgtacccggcgttaaatccaggtgctgcaaaatcgccagttccagcagcgcgggcaagttgcgcaccagctgcgtggtgatgataaacaccagaatggcaatcagcaccgcaccgagggtaattggctccagactttctacgccctgtaccgtggaggtgacatcccacaggctaatattttcgaggaagccgaaagcggaatggatttcactccacagcacaatgacagaaagcagggcgatcaacatcaaaatactgcgcaccagccgcaaggattgcgcactgatggcatcgagatcgacttcgctttcatcgacttcaattgctccttccgggctactgtgatgatgcgcttcctcttcgccacgcgcacgttgcgctaacatctctgcccggcgatgcttcgcccgatcaaacgccagcctgcggcgctggatcagcatccagcggcggataacgtgataaaccaccagtagcaggaaccagatggcaacgctggtttcaagcctcgctaacagcgcctgtgccgttgccagataacccaccgcgctcgccagaatggcaaccaacggcgcgccaatcatcatgttccacagcatatggttggtaatgttgtcgccgctgccctctttgttgagatacagcggaatcccggcctttttcaggctgagggtgaccaccgccagcgcaccgcaaatgaggataaagcaaagccgtcccaggctaccggagaattcacggtcgtcgaggttatcgaacatcatcagcgccataatcagcggcacaataagcccgatgctcatcaggtagtagcgcatcccacgggaaacacgttcgcgcggccagccaaaatgagcgataaacaagccgttcgggcgggcaaaggtggcgcaaatcatcactacccacagcagcggcacggtggccgttacaccatcgccaatcgcgaccgccagcggataaggccacgcctcgcgcaagccgtaacccagcgtcatccacagcaccggtaacggactcgcgacgagaatgctccagaaaagagtgcgcaacgtcagccagaagtgatcctgagtcactttgccaactttcgccgcgctacgttcaagaaaacgggtgaaatagcggcggctgtaaatactgcaaccgaccagaatcaacgcgccaaacagcggcaaaattgtctctttgctggtcagcatcatcacactggctttgcccaactgactgaaggtgtccaggctaatgagacgacgcagatcctgggcgatttccagcggccaggcgatggtcatcgggcgcacgtcagaggtccagaacagatagcggtgcgttgcttcgttcacctctttcagcgcatcctccagttgcccgttggagactttcagcttggtcagttccaatagtagcgtgtcgccaccctgcaacaaactgttcagcaactcacgctgagtgcgcagttgtgcttccagaatacggttttgctcggcagtcagcggctgaccgtcggcctgatgaatttgccgtagcagcggctgtttattaagcagatcctcataacgtaaccgttgcacacgcaactgcgccatttcggtatcaagctgttgtggtttcggcatttccggcagccgtgccacctgcgcccgcagcgcttcgccgagcagattggagcttcccagccattggctctgttcacgcagcgtattcaacgcctgccggacctgtaacgtctggctggcagcctgacgctgttggctggcaacgagatccatccgctgcgcctgttgattcaaagccgcgcttagttcgcggttaattttgaattgcgcgacgatatctttcggcaaatcggcgctgttttctgccagcaattcggtactttccagcgcccgctccgcctcaagctgacgttggctgtttaattgattacgcaaggcctgcaaatacgcatccagttgctggctctctttttccgccagctcactgcgtaagcgcgctaattcctggcggttattggcagacagctgcgccagctccagttcatcaacgagcgccttaagacgtgcagagtcagactgcaacgcgaaattttgtgcctgattgagcggagtattgccggtaagcgttcccaggcggcgctcgatctcatttaactgacggcgggcgtcggtttgctgttgcggcagttgattcaggctatcggcaatctcgcgggcgcgctcctgctcttgctgggcctgacggcttttatccagcaactggctgctgacctggagaatttcctgattcagcgcgtcggtagacattcccgggctcacgctgcgcggctcgtcacgcatgttgtttaattgtgcgcgcagagtagcggagagtttcggataattatcgataacttgctgatattgtttgatgcgctcaagggaaccttttcgttcctcaagcgcatttaaggcagactggagcgcctctacgacttccggctgtgcgggtttcgccgcttttgcctgctccagttcctgagtgatttgtttgctatcgggggccgtcgcggcgtacgccccccaactgaggcaccaggccatcagaaaagtgataatcaggcgcacgtcagcgtttcctttgatggattagacctggtcttttttgtcgtcaaccaatgggctggcgtcgtgttctgcttcgatctcttcagcaggaagcggggcaggttcagcgtctggcgtaacaaaggtttcggtagatactgccagcggctggccaattttcgtgacagacaggctttccagttgctcaaccagattcactttacccggtgcaaacaggttgataacggtggaaccgagtttaaagcgacccatttcctggcctttcagcagtgccacagaaccgtcgttttccccggcaggccaggtccagcgcttgatgataccttcgcgcggcggcgtaatggtgcccgcccagaccgtctcaatgctgccaacaatcgtcgctccgaccagaatctgcgccattgggccaaattcggtatcgaaaaggcaaatcacgcgttcgttacgggcaaacagattcggcacgttctgagccgtgagatggttaacggagaagagatcgcccggcacgtagatcatctcacgcagaataccgttgcacggcatgtgtacgcggtggtagtcacgcggggagaggtaagtggtcacaaacgtaccgttgcggaacaggtccgccatcagatagttgcctgccagcagggcttcgaggctgtagttgtggcctttggcttgcaggattttatcttcttcgattttacccaactggctgataacgccatcggcaggcatgaccagtacattcggatcggtatcgattgggcgtacttcgtcacgcagcggacggacaaagaattcgttaaaggtgcggtagctggcggtgtccggcttttgcgcctctttcatgtcgaccttgtagtatttaacgaacagatcgataaccagttttgtcagccatcctgcccgcttgcttgcgccccaacccgccaggcgagtaagccatagtttcggcagaatgtactgtaggctaagtttaaaactatttaacaaggtagcctccaggccattgttttgtcgttcctgatccggcctacatgccggatcctgaaaaaaaggggacgattctaacgacggttagcttaattgtcagtcatccgtatcagaaaagtttttacgcgtttttacctgcgccatgctttccagaatacggtgatagttttcgaaacgggtttccgcgattttcccttcctcaaccgcttcccggatagcgcagcccggatcggtatcgtgtttgcaatcgcgatatttacacagacctaaatagtcatggaattcgacaaagccctgagtgatttgttccggctccaggtgccagaggccgaactcacgcactcctggggagtcaatcacatcaccgccgtgcgggaagtgatacagccgagcggcggtcgtggtgtgctgaccgagcccgctgttgtcagagatatcgttggtcaggatctctttttgcagccccagcaacgcattcagcaggctggatttgccgacgccagactgcccggcaaaaatgctgatgcgcccggtcaacgcctcttccagcggttttagcccatcctgagtatggctggaaaccatcaatacgcgataaccgatattgcggtagatatccatctgctcgttgacgaacgccatgccttcgtcgtccagcaggtctatcttgttgagcacaataatcggctcaatctgcaaggtttcgcaggccaccaggtaacggtcgataatattgaggctcagctccggcaaaatggcggagacaatgacaatctggtcgatgttggcggcaataggttttacgccgtcgtagaaatccggacgcgtcaacacgctggtacgctcatgcaccgcttccacgatccctttgacatttacgccttccgccgccggtttacccggacgccagactacgcggtcgccggttaccaggctacggatggtacggcgaatattgcagcggtgaacgtcgccatcggcggattccacatcagcgtgcataccaaagcggctgatgacgataccttcatcaggctcgccaaacagattgtcgtcgtagtcgggcttctccttagacgttttaagacgacgctggtgattggcgttcacgcggcgctgctggcctttggagagtttatttttactcaatcgtacagactcctggtcgcccctgatgggcaaaacatctatgatacacgcaattgtggatcaatatagtcactgtgaatgggtggaaaatagcatgagtgccaatgaaaacaacctgatttggatcgatcttgagatgaccggtctggatcccgagcgcgatcgcattattgagattgccacgctggtgaccgatgccaacctgaatattctggcagaagggccgaccattgcagtacaccagtctgatgaacagctggcgctgatggatgactggaacgtgcgcacccataccgccagcgggctggtagagcgcgtgaaagcgagcacgatgggcgatcgggaagctgaactggcaacgctcgaatttttaaaacagtgggtgcctgcgggaaaaagcccgatttgcggtaacagcatcggtcaggaccgtcgtttcctgtttaaatacatgccggagctggaagcctacttccactaccgttatctcgatgtcagcaccctgaaagagctggcgcgccgctggaagccggaaattctggatggttttaccaagcaggggacgcatcaggcgatggatgatatccgtgaaagcgtggcggagctggcttactaccgcgagcattttatcaagctgtaaaatttttcctggtcacgtaagcgccggaatccacttgcggcggcgtgattttgacgctaaattgaacgtcttgctgataatttcagcacttgagataaaaacgcaaaaaaaacttttttggggggttgcagagggaaagatttctcgtataatgcgcctcccgtaacgacgcagaaatgcgaaaattacgaaagcaaaattaagtagtacgcgggaatagctcagttggtagagcacgaccttgccaaggtcggggtcgcgagttcgagtctcgtttcccgctccaaaatttgaaaagtgctgcaaagcacagaccacccaagcgggaatagctcagttggtagagcacgaccttgccaaggtcggggtcgcgagttcgagtctcgtttcccgctccaaaatttgaaagtgctgtaaggcacagaccacccaagcgggaatagctcagttggtagagcacgaccttgccaaggtcggggtcgcgagttcgagtctcgtttcccgctccaaattcttctctcaataaaatatccacagcgacgcgatgcgttattgctggtttttgttgtctctgacaaactcttgtaaacagagttatccacagcctcaggctgtaatcttaatttcaaagaaacttcgcacggtgaatagtatttttttaacctattgatagataagttaaaaattaagattccgttttgtcgagtcgatcacttgacgattttattcgtcttgaattgcaatgcgtttttatttttattcacaagctgtggatgaatcaggcgtcacgcggtaaccctttttcaatcacccgaaccagacgctgttttttcggcaattgcacttcgactatgcacgcatttcgtctctctatttgctgcgcaatcgcccacgctatgtgctcatcgagaagtgggtgctcacctttacgactttccagcgctgtcaaaatcgtttcatcccaaggggcattgcctaatgctacggcgatattacgcagccaacgcaggtgaccaatacgacgaatcgcgcttccttccgtgacttttaaaaacttctcttcgctccaggcgaataactcaatgagttccggtgcgtgtagcggcttacgcgggctgaaatcctcttctgtggtgagttgactatagcgattccacgggcagataagctggcagtcatcgcaaccgtaaatacggtttcccattaacggtcgcaactcttccgggatcgccccttcaagttcgatggtgagataagagatacagcggcgagcatcgacggtatatggctcgacgatggcaccggtcgggcaaatcgtcatacaggccacgcatttgccgcatccttcctcgactggttgatccacgggcagcggaatatcgaccagcaattcgcctaaaaagaagaagctaccggcctcgcgattgaggataagactgtgcttacctgtccagccgagcccagctttttcagctaacgggcgctcgagaataggcgcagaatcgacaaacggtctaaaattcaggctaacacaatgttgctgaatcatctcgcccagctttttgagtcggttgcgcagaagtttgtgatagtcacggcccagcgcataacggctaacatagccgagtttggggtttttcagcgtgctggcaaatgcggcgttagcaggaaggtaattcatccgcacgctgatcacgcgcagcgtaccgggcaataactcatgagggcgagcgcgcagcataccgtgacgtgccatccagtccatttcgccgtggtattgtttgtccagccatgcttgcagtttgggctcggactcgctgagatcggtatcggtaatacctacctgctgaaagcccagttccagcccccactgtttaattttttgcgctaactgattgagatcgaggggctcactcatgacggaccatacaatgaagaaaaaccccgtaagtataccacacaccgtctggtacgccgacgatatccgccgcggagaacgcgaggcggcagatgtgctggggctcacactctatgagctgatgcttcgcgctggcgaggccgcattccaggtgtgtcgtagcgcgtatcctgacgcccgccactggctggtgctgtgcggtcatggtaataacggcggcgatggctacgtggtcgcgcgactggccaaagcggtcggcattgaggtcacgttgttggcccaggagagcgacaaaccgttgccggaagaggccgcgctggcacgcgaagcatggttaaacgcgggtggcgagatccatgctagcaatattgtctggcccgaaagcgtagatctgattgttgatgcgctgctcggtaccggtttgcggcaagcgccccgcgaatccattagccagttaatcgaccacgctaattcccatcctgcgccgattgtggcggttgatatcccttccggcctgctggctgaaactggcgctacgccaggcgcggtgatcaacgccgatcacaccatcacttttattgcgctgaaaccaggcttgctcactggaaaagcgcgggatgttaccggacaactgcattttgacagtctggggctggatagttggctggcaggtcaggagacgaaaattcagcggtttagtgcagaacaactttctcactggctaaaaccgcgtcgcccgactagccataaaggcgatcacgggcggctggtaattatcggtggcgatcacggcacggcgggggctattcgtatgacgggggaagcggcgctgcgtgctggtgctggtttagtccgagtactgacccgcagtgaaaacattgcgccgctgctgactgcacgaccggaattgatggtgcatgaactgacgatggactctcttaccgaaagcctggaatgggccgatgtggtggtgattggtcccggtctgggccagcaagagtgggggaaaaaagcactgcaaaaagttgagaattttcgcaaaccgatgttgtgggatgccgatgcattgaacctgctggcaatcaatcccgataagcgtcacaatcgcgtgatcacgccgcatcctggcgaggccgcacggttgttaggctgttccgtcgctgaaattgaaagtgaccgcttacattacgccaaacgtctggtacaacgttatggcggcgtagcggtgctgaaaggtgccggaaccgtggtcgccgcccatcctgacgctttaggcattattgatgccggaaatgcaggcatggcgagcggcggcatgggcgatgtgctctctggtattattggcgcattgcttgggcaaaaactgagcccgtatgatgcagcctgtgcaggctgtgtcgcgcacggtgcggcagctgacgtactggcggcgcgttttggaacgcgcgggatgctggcaaccgatctcttttccacgctacagcgtattgttaacccggaagtgactgataaaaaccatgatgaaagcagtaattccgctccctgaataaggaagtgactgataaaaaccatgatgaatcgagtaattccgctccctgatgagcaggcaacattagacctgggcgagcgggtagcgaaagcctgcgatggcgcaaccgtaatctatctgtatggcgatttaggcgcaggtaaaaccacctttagccggggctttttacaggctctgggtcatcagggtaatgtcaaaagccccacttatacgctggtcgaaccctatacgctcgacaacttaatggtctatcactttgatttgtaccgccttgccgatcccgaggagctggagtttatggggatccgcgattattttgccaacgatgccatctgcctggtggagtggccacaacaaggtacaggtgttcttcctgacccggatgtcgaaatacacattgattatcaggcacaaggccgtgaggcgcgcgtgagtgcggtttcctctgcgggtgaattgttgctggcgcgtttagccggttaacctttgaaaggtggcgggatgatgtatcgcatcagaaattggttggtagcgacgctgctgctgctgtgcacgccggtgggtgccgcgacgctctctgatattcaggtttctaacggtaatcaacaggcgcggataacgttgagttttattggcgatcctgattatgcgtttagccatcaaagcaaacgcaccgtggcgctcgatatcaaacaaacgggcgtgattcagggactgccgttgttgttcagcggcaataatctggtgaaggcgattcgctctggaacgcctaaagatgcacaaacgctacggctggtggtcgatcttaccgaaaacggtaaaaccgaagcggtgaagcggcagaatggcagcaattacactgtcgtctttacgattaacgccgatgtgccgccaccgcctcctccgccgcccgtggttgcgaaacgcgttgaaacgcctgcggttgtcgcaccgcgcgtcagcgaaccggcgcgcaatccgtttaaaacggaaagtaaccgcactacgggtgttatcagcagtaatacggtaacgcgtccggcagcgcgcgcgacggctaacactggcgataaaattatcatcgctattgatgccggacacggcggtcaggaccctggcgctatcggccccggtggtacgcgggagaaaaatgtcaccatcgccatcgcgcgtaaattgcgtactttgctcaatgacgatccgatgtttaaaggcgttttaacccgtgacggggattactttatcagcgtgatggggcgcagtgatgtggcacgtaagcaaaacgccaatttcctcgtgagcattcacgctgatgccgcaccgaaccgcagtgcgactggcgcttccgtatgggtgctctctaaccgtcgcgccaacagtgaaatggccagctggctggagcagcacgagaaacagagcgagctgctgggtggggcgggtgatgtgctggcgaacagtcagtctgacccctatttaagccaggcggtgctggatttacagttcggtcattcccagcgggtagggtatgatgtagcgaccagtatgatcagtcagttgcaacgcattggcgaaatacataaacgtcgaccagaacacgccagccttggcgttctgcgcagcccggatatcccaagtgtactggtcgaaaccggttttatcagcaacaacagcgaagaacgtttgctggcgagcgacgattaccaacaacagctggcagaagccatttacaaaggcctgcgcaattacttccttgcgcatccgatgcaatctgcgccgcagggtgcaacggcacaaactgccagtacggtgacgacgccagatcgcacgctgccaaactaaggacgattgatgccaattcaggtcttaccgccacaactggcgaaccagattgccgcaggtgaggtggtcgagcgacctgcgagcgtagtcaaagaactagtggaaaacagcctcgatgcaggtgcgacgcgtatcgatattgatatcgaacgcggtggggcgaaacttatccgcattcgtgataacggctgcggtatcaaaaaagatgagctggcgctggcgctggctcgtcatgccaccagtaaaatcgcctctctggacgatctcgaagccattatcagcctgggctttcgcggtgaggcgctggcgagtatcagtagcgtttcccgcctgacgctcactagtcgcaccgcagaacagcaggaagcctggcaggcctatgccgaagggcgcgatatgaacgtgacggtaaaaccggcggcgcatcctgtggggacgacgctggaggtgctggatctgttctacaacaccccggcgcggcgcaaattcctgcgcaccgagaaaaccgaatttaaccacattgatgagatcatccgccgcattgcgctggcgcgtttcgacgtcacgatcaacctgagccataacggtaaaattgtgcgtcagtaccgcgcagtgccggaaggcgggcaaaaagaacggcgcttaggcgcgatttgcggcaccgcttttcttgaacaagcgctggcgattgaatggcaacacggcgatctcacgctacgcggctgggtggccgatccaaatcacaccacgcccgcactggcagaaattcagtattgctacgtgaacggtcgcatgatgcgcgatcgcctgatcaatcacgcgatccgccaggcctgcgaagacaaactgggggccgatcagcaaccggcatttgtgttgtatctggagatcgacccacatcaggtggacgtcaacgtgcaccccgccaaacacgaagtgcgtttccatcagagccgtctggtgcatgattttatctatcagggcgtgctgagcgtgctacaacagcaactggaaacgccgctaccgctggacgatgaaccccaacctgcaccgcgttccattccggaaaaccgcgtggcggcggggcgcaatcactttgcagaaccggcagctcgtgagccggtagctccgcgctacactcctgcgccagcaagtggcagtcgtccggctgccccctggccgaatgcgcagccaggctaccagaaacagcaaggtgaagtgtatcgccagcttttgcaaacgcccgcgccgatgcaaaaattaaaagcgccggaaccgcaggaacctgcacttgcggcgaacagtcagagttttggtcgggtactgactatcgtccattccgactgtgcgttgctggagcgcgacggcaacattagtcttttatccttgccagtggcagaacgttggctgcgtcaggcacaattgacgccgggtgaagcgcccgtttgcgcccagccgctgctgattccgttgcggctaaaagtttctgccgaagaaaaaagcgcattagaaaaagcgcagtctgccctggcggaattgggtattgatttccagagtgatgcacagcatgtgaccatcagggcagtgcctttacccttacgccaacaaaatttacaaatcttgattcctgaactgataggctacctggcgaagcagtccgtattcgaacctggcaatattgcgcagtggattgcacgaaatctgatgagcgaacatgcgcagtggagtatggcacaggccataaccctgctggcggacgtggaacggttatgtccgcaacttgtgaaaacgccgccgggtggtctgttacaatctgttgatttacatccggcgataaaagccctgaaagatgagtgatatcagtaaggcgagcctgcctaaggcgatttttttgatggggccgacggcctccggtaaaacggcgttagccattgagctgcgtaaaattttaccagtagagttgataagcgttgattctgcccttatttacaaagggatggatatcgggacggcgaagccgaacgctgaagagttactcgccgcgccgcaccgattgctggatattcgcgatccgagccaggcttacagcgctgctgattttcgccgcgatgcgctggcggaaatggccgatatcaccgcggcggggcggatcccactgttagtgggcggtacgatgttgtatttcaaggcattgctggaagggttgagcccgctaccgagcgcagacccggaagtacgggccagaattgagcaacaggcggcagagcaaggttgggagagtttgcatcgtcaacttcaggaggtagatccggttgcggcagcaaggattcatccaaatgatccacaaaggctttcccgggcactggaagtttttttcattagcggtaaaactttaacggaactgacgcaaacgagtggagacgctctaccgtatcaggtgcatcagttcgccatcgccccggcgagccgtgaactgctccatcaacgcattgagcagcgttttcatcagatgttggctagtggttttgaagcagaagtccgggcgctttttgcccgaggagatttgcatacggacttgccttccattcgttgcgtgggttatcgccagatgtggtcttaccttgaaggcgaaatcagttacgatgaaatggtttatcgaggtgtttgcgccacgagacagttggcgaagcggcagataacctggctgcgtggttgggaaggggttcactggcttgacagtgaaaaaccagaacaggcgcgtgacgaagtattacaggttgttggtgctatcgcaggctgaatgtgtacaattgagacgtatcgtgcgcaattttttcagaatcgaaaggttcaaagtacaaataagcatataaggaaaagagagaatggctaaggggcaatctttacaagatccgttcctgaacgcactgcgtcgggaacgtgttccagtttctatttatttggtgaatggtattaagctgcaagggcaaatcgagtcttttgatcagttcgtgatcctgttgaaaaacacggtcagccagatggtttacaagcacgcgatttctactgttgtcccgtctcgcccggtttctcatcacagtaacaacgccggtggcggtaccagcagtaactaccatcatggtagcagcgcgcagaatacttccgcgcaacaggacagcgaagaaaccgaataaggtttcgggctgtttttttacacggggagccagcgatcctgcgttccccgctgatctatttagagggttatacgcttgtttgaccgttatgatgctggtgagcaggcggtactggtacacatctattttacgcaagacaaagatatggaagacctccaggagtttgaatctctggtctcttccgccggtgtcgaagcattgcaggtgattaccggtagccgtaaagcgccgcacccaaagtattttgtaggtgaaggtaaagcagttgaaattgcggaagctgtcaaagcgacgggtgctagcgtcgttctttttgaccatgccctgagcccggcgcaagagcgtaacctggagcgtttgtgcgagtgtcgtgttatcgaccgcaccggccttattttagatattttcgcccaacgtgcgcgtacccatgagggtaagttgcaggttgagctggcgcagctgcgccatctggctacgcgcctggtgcgtggctggacccaccttgaaagacagaaaggcgggataggtttgcgtggtccgggtgaaacccagctcgaaaccgaccgtcgtttgttgcgtaatcgcatcgtgcagatacagagccgcctggaaagagttgaaaagcagcgtgagcaggggcggcaaagccgtatcaaagccgacgttcctactgttagcctggtgggatataccaacgccggtaaatctacccttttcaatcgcatcaccgaagcgcgggtctacgcggcagaccagttgtttgccaccctcgacccgacgttgcggcgtattgacgttgcagatgtcggtgaaaccgtacttgcagataccgtagggtttattcgccacctgccgcacgatctggtggcggcatttaaagccacgttacaagagacgcggcaagccacattactgctgcacgtcattgatgcggcggatgtgcgtgtacaagaaaacatcgaagcggtgaatacggttcttgaagagatcgacgctcacgagatcccaaccctgctggtgatgaacaagatcgatatgctggaagatttcgaaccgcgtattgatcgggacgaagagaacaaaccgaaccgtgtctggctttccgcacagaccggagcggggataccacagctttttcaggctttgacggagcggctttccggcgaggtggcgcagcatacattgcgtctgccaccgcaggaagggcgtctgagaagtcgtttttatcagcttcaggcaatagaaaaagagtggatggaggaggacggcagcgtaagtctgcaagttcgtatgccgatcgttgactggcgtcgcctctgtaaacaagaaccggcgttgatcgattacctgatctaacggcgtagcgtctgaagcgtggagtcatatcctctggcgtcgaaagacaacagggatcaccgcataacaaatatggagcacaaacatggcgtggaatcagcccggtaataacggacaagaccgcgacccgtggggaagcagcaaacctggcggcaactctgagggaaatggaaacaaaggcggtcgcgatcaagggccacctgatttagatgatatcttccgcaaactgagcaaaaagctcggtggtctgggcggcggtaaaggcaccggatctggcggtggcagtagtagccaaggcccgcgcccgcagcttggcggtcgtgtcgttaccatcgcagcggcagcgattgtcattatctgggcggccagtggtttctataccattaaagaagccgaacgcggcgtggtaacacgctttggtaaattcagccatctggttgagccgggtctgaactggaaaccgacgtttatcgacgaagtcaaaccggtgaacgtggaagccgtgcgtgaactggccgcttctggtgtgatgctgacgagcgacgagaacgtagtgcgcgttgagatgaacgtgcagtaccgcgtcaccaatccggaaaaatatctgtatagcgtgaccagcccggatgacagcctgcgtcaggctaccgacagcgccctgcgtggagttatcggtaaatacaccatggaccgcattctgacggaaggtcgtaccgtgattcgtagcgatactcagcgcgaactggaagagacgattcgtccgtatgacatgggtatcacgctgctggacgtcaacttccaggctgctcgtccgccggaagaagtaaaagcggcgtttgacgatgcgattgccgcgcgtgaaaacgaacagcaatacattcgtgaagcagaagcgtataccaacgaagttcagccgcgtgcgaacggtcaggcgcaacgtatcctcgaagaggcgcgtgcgtacaaggcccagaccatcctggaagctcagggtgaagtggcgcgctttgctaaacttctgccggaatataaagccgcgccggaaattactcgcgagcgtctgtatatcgagacgatggaaaaagtgttgggtaacacccgcaaagtgctggttaacgataaaggtggcaacctgatggttctgccgttagaccagatgctgaaaggtggtaacgcccctgcggcgaagagcgataacggtgccagcaatctgctgcgtctgccgccagcctcttcctccacaaccagtggagcaagcaacacgagctccaccagtcagggcgatattatggaccaacgccgcgccaacgcgcagcgtaacgactaccagcgtcagggggaataacgatgcgtaagagtgttatcgcgattatcatcatcgtgctggtagtgctttacatgtctgtctttgtcgtcaaagaaggtgagcgcggtattacgctgcgttttggtaaggtactgcgtgacgatgacaacaaacctctggtttatgagccgggtctgcatttcaagataccgttcattgaaacggtgaaaatgctcgacgcacgtattcagaccatggacaaccaggccgaccgctttgtgaccaaagagaagaaagacctgatcgtcgactcttacatcaaatggcgcatcagcgatttcagccgttactacctggcaacgggtggtggcgacattagccaagcggaagtgctgttgaaacgtaagttctctgaccgtctgcgttctgaaattggtcgcctggacgtgaaagatatcgtcaccgattcccgtggtcgtctgaccctcgaagtacgtgacgcgctgaactccggttctgcgggtacagaagatgaagttactaccccggcggcagataacgccattgccgaagcggcagagcgcgtaacggctgagacgaagggcaaagttccggtcatcaacccgaacagtatggcggcgctgggtattgaagttgtcgatgtgcgtatcaagcagatcaacctgccgaccgaagtgtctgaagcgatctacaaccgtatgcgcgccgagcgtgaagcggtagcgcgtcgtcaccgtagtcaaggtcaggaagaagcggaaaaactgcgcgcgactgccgactatgaagtgaccagaacgctggcagaagctgagcgtcagggccgcatcatgcgtggtgaaggcgatgccgaagcagccaaactgtttgctgatgcattcagtaaagatccggacttctacgcattcatccgtagcctgcgtgcttatgagaacagcttctctggcaatcaggacgtgatggtcatgagcccggatagcgatttcttccgctacatgaagacgccgacttccgcaacgcgttaatataacgactgcggtacaggtcaataaagccaccgcatcctcagggatgtcggtggttttctttttctataaggataatgaatgaatagcacaatctggctggcgcttgccctggttttggtactggaaggtttagggccgatgctttacccgaaggcatggaagaagatgatctctgcgatgaccaatttgcccgataatattttacgtcgttttggcggtggacttgtggttgcgggcgttgtggtctactacatgttgaggaaaacgattggctgaacaaaaaacagactgatcgaggtcatttttgagtgcaaaaagtgctgtaactctgaaaaagcgatggtagaatccatttttaagcaaacggtgattttgaaaaatgggtaacaacgtcgtcgtactgggcacccaatggggtgacgaaggtaaaggtaagatcgtcgatcttctgactgaacgggctaaatatgttgtacgctaccagggcggtcacaacgcaggccatactctcgtaatcaacggtgaaaaaaccgttctccatcttattccaagtggtattctccgcgagaatgtaaccagcatcatcggtaacggtgttgtgctgtctccggccgcgctgatgaaagagatgaaagaactggaagaccgtggcatccccgttcgtgagcgtctgctgctgtctgaagcatgtccgctgatccttgattatcacgttgcgctggataacgcgcgtgagaaagcgcgtggcgcgaaagcgatcggcaccaccggtcgtggtatcgggcctgcttatgaagataaagtagcacgtcgcggtctgcgtgttggcgaccttttcgacaaagaaaccttcgctgaaaaactgaaagaagtgatggaatatcacaacttccagttggttaactactacaaagctgaagcggttgattaccagaaagttctggatgatacgatggctgttgccgacatcctgacttctatggtggttgacgtttctgacctgctcgaccaggcgcgtcagcgtggcgatttcgtcatgtttgaaggtgcgcagggtacgctgctggatatcgaccacggtacttatccgtacgtaacttcttccaacaccactgctggtggcgtggcgaccggttccggcctgggcccgcgttatgttgattacgttctgggtatcctcaaagcttactccactcgtgtaggtgcaggtccgttcccgaccgaactgtttgatgaaactggcgagttcctctgcaagcagggtaacgaattcggcgcaactacggggcgtcgtcgtcgtaccggctggctggacaccgttgccgttcgtcgtgcggtacagctgaactccctgtctggcttctgcctgactaaactggacgttctggatggcctgaaagaggttaaactctgcgtggcttaccgtatgccggatggtcgcgaagtgactaccactccgctggcagctgacgactggaaaggtgtagagccgatttacgaaaccatgccgggctggtctgaatccaccttcggcgtgaaagatcgtagcggcctgccgcaggcggcgctgaactatatcaagcgtattgaagagctgactggtgtgccgatcgatatcatctctaccggtccggatcgtactgaaaccatgattctgcgcgacccgttcgacgcgtaattctggtacgcctggcagatattttgcctgccgggcgaacagtgtgatacattgctgtgtcgggtaagccattacgctatccgacacagtgttaaatcctcgcttttttccttccccgaactgaaataaattagcgacacagcttgtggctggtttatcatcaatataaatgtattttttcccgatttcccttttgaggttgatgtgcagttaacgagtttcactgattacggattacgtgcgctgatctacatggcgagtttgccagaagggcggatgaccagtatttctgaagtgactgacgtctacggcgtctcccgtaatcatatggtcaaaataatcaatcaacttagtcgtgccggctacgtgactgctgttcgtggaaaaaatggcggcattcgcctgggtaaaccggcgagtgcgatacgtattggtgatgtggtgcgcgagctggagcccttaagcctggtgaattgcagcagtgagttttgccacattacacctgcctgtaggttgaaacaggcactttctaaggccgtgcaaagttttcttacggaactggataactacacgcttgccgatttggttgaagagaatcaaccgctttataaattattgctggtggagtgacgaaaatcttcatcagagatgacaacggaggaaccgagatgagtcaagatcctttccaggaacgcgaagctgaaaaatacgcgaatcccatccctagtcgggaatttatcctcgaacatttaaccaaacgtgaaaaaccggccagccgtgatgagctggcggtagaactgcacattgaaggcgaagagcagcttgaaggcctgcgtcgccgcctgcgcgcgatggagcgcgatggtcaactggtcttcactcgtcgtcagtgctatgcgctgccggaacgcctcgacctggtgaaaggtaccgttattggccaccgtgatggctacggctttctgcgggttgaagggcgtaaagatgatttgtatctctccagcgagcagatgaaaacctgcattcatggcgatcaggtgctggctcagccgctgggtgctgaccgtaaaggtcgtcgtgaagcgcgtattgtccgcgtactggtgccaaaaaccagccagattgttggtcgctactttaccgaagcgggcgtcggctttgtggttcctgacgacagccgtctgagcttcgatatcttaatcccgcccgatcagatcatgggcgcgcggatgggctttgtggtcgtagtcgaactgactcagcgtccgactcgccgcaccaaagcggtgggtaaaatcgtcgaagtgctgggcgacaatatgggcaccggcatggcggttgatatcgctctgcgtacccatgaaattccgtacatctggccgcaggctgttgagcaacaggttgccgggctgaaagaagaagtgccggaagaagcaaaagcgggccgtgttgatctgcgcgatttaccgctggtcaccattgatggcgaagacgcccgtgactttgacgatgcagtttactgcgagaaaaaacgcggcggcggctggcgtttatgggtcgcgattgccgacgtcagctactatgtgcgtccgagtacgccgctggacagagaagcgcgtaaccgtggcacgagcgtgtacttccctagccaggttatcccgatgctgccggaagtgctctctaacggcctgtgtagcctcaacccgcaggtagaccgcctgtgtatggtgtgcgagatgacggttagcagcaaaggccgcctgacgggctacaaattctacgaagcggtgatgagctctcacgcgcgtctgacctacaccaaagtctggcatattctgcagggcgatcaggatctgcgcgagcagtacgccccgctggttaagcatctcgaagagttgcataacctctataaagtgctggataaagcccgtgaagaacgcggtgggatcagttttgagagcgaagaagcgaagttcattttcaacgctgaacgccgtattgaacgtatcgaacagacccagcgtaacgacgcgcacaaattaattgaagagtgcatgattctggcgaatatcagcgcggcgcgtttcgttgagaaagcgaaagaaccggcactgttccgtattcacgacaagccgagcaccgaagcgattacctctttccgtagtgtgctggcggagctggggctggaactgccgggcggtaacaagccggaaccgcgtgactacgcggagctgctggagagcgttgccgatcgtcctgatgcagaaatgctgcaaaccatgctgctgcgcagcatgaaacaggcgatttacgatccagaaaaccgtggtcactttggcctggcattgcagtcctatgcgcactttactagcccgattcgtcgttatccagacctgacgctgcaccgcgccattaaatatctgctggcgaaagagcaggggcatcagggcaacaccactgaaaccggcggctaccattatagcatggaagagatgctgcaactgggtcagcactgtagcatggcggaacgtcgtgccgacgaagcaacgcgcgatgtggctgactggctgaagtgtgacttcatgctcgaccaggtaggtaacgtctttaaaggcgtaatttccagcgtcactggctttggcttcttcgtccgtctggacgacttgttcattgatggtctggtccatgtctctagcctggacaatgactactatcgctttgaccaggtagggcaacgcctgatgggggaatccagcggccagacttatcgcctgggcgatcgcgtggaagttcgcgtcgaagcggttaatatggacgagcgcaaaatcgactttagcctgatctccagcgaacgcgcaccgcgcaacgtcggtaaaacggcgcgcgagaaagcgaaaaaaggcgatgcaggtaaaaaaggcggcaagcgtcgtcaggtcggtaaaaaggtaaactttgagccagacagcgccttccgcggtgagaaaaaaacgaagccgaaagcggcgaagaaagacgcgagaaaagcgaaaaagccaagcgcgaaaacgcagaaaatagctgcagcgaccaaagcgaagcgtgcggcgaagaaaaaagtggcagagtgatcaataccctctttaaaagaagagggttagattgctgacaaaatgcgctttgttcatgccggatgcggcgtgaacgccttatccggcctacataatcacgcaaattcaatatattgcagagatcatgtaggccggataaacgtagtgcatcaggcaaaacgtaaacaacgagtacattaatgagcgaaatgatttacggcatccacgcagtgcaggccctgctggagcgcgcccctgaacgttttcaggaagtctttattttaaaaggccgtgaagataaacgtctgttaccgctgattcacgcccttgagtctcagggcgtggttatccagttggcaaaccgccaatatctcgacgagaaaagcgacggtgccgtgcatcagggcattatcgcccgcgtgaagccaggacgtcagtatcaggaaaacgatctgccggatctgatcgctagcctcgatcaaccgttcctgctgatcctcgacggcgtaaccgatccgcacaacctcggcgcgtgcctgcgtagtgcggacgccgcaggcgttcatgcggtgattgtgccgaaagatcgctccgcacagctcaacgctacggcgaaaaaagtagcctgcggcgcggcagaaagcgttccgctgattcgggtgactaaccttgcgcgcaccatgcgtatgttgcaggaagagaatatctggatcgtcggtacggcaggcgaggcggatcatacactctatcagagcaaaatgaccggacgcctggcgctggtgatgggtgcggaaggtgaaggtatgcgtcgcctgactcgtgaacattgcgatgagttgatcagcatcccgatggctggaagcgtttcttccctgaacgttagcgttgcgaccggaatttgcttatttgaagcggtgcgccagcgcagctaatttctcagaattatgaaaagccatccagatttggatggtttttttttgtctatagctggtaagataattacgtattgcaaatattcattttattaatatttaaacttaatctatatggaataatatatgacatggaatccgttggcgctagcgacggcgctgcaaactgtacctgaacaaaatattgatgtaacaaatagcgagaacgcattaattattaaaatgaatgattatggcgatttgcaaatcaatattctttttacttcccgccaaatgattatcgaaacctttatttgtccggtgagtagtatcagcaatccagatgaatttaataccttcttattaagaaatcagaagatgatgccgttgagtagcgtagggatctccagcgtacaacaggaagagtattacattgttttcggggcgttaagccttaaatcttctcttgaagatatcctgcttgagataaccagcctggtagataacgcattggatctggctgaaattacagaagaatatagtcactaattacaaggacgggtatttatgggaattttaaaaagtttatttacgctggggaaaagctttatctcccaggcggaagaatccattgaagaaacccagggcgtgcgcatgctggaacagcatattcgtgacgctaaagctgaactcgataaagccggaaaatctcgcgttgatctgctggcgcgggtgaaattaagtcacgataagctgaaagatttacgtgagcgcaaagccagtctggaagcccgtgcgctggaagcgttaagcaagaacgttaatccgagcttgattaacgaagttgctgaagaaatcgcgcgccttgagaatctcattaccgctgaagagcaagtgttgagcaatctggaagtctcccgtgatggcgtggaaaaagcagttacagcgacagcgcagcgtatcgctcagtttgagcagcaaatggaagtcgttaaagccactgaagccatgcagcgtgcacaacaggctgtaacaacctctaccgttggcgcatcttccagcgttagcacagcggcagaatccttaaaacgcctgcaaacgcgtcaggccgaacgtcaggctcgcctggatgctgccgcacagttggagaaagtcgcagacggtcgcgaccttgacgaaaagctggcggaagccggaattggcggtagcaataaaagtagcgcccaggatgtattagcaagactgcaacgccaacagggcgagtaatttttttgccagcctcgctaaaaggctggcaactattttaaggataaaatatgtctggttttttccagcgtctgtttggcaaggataataagccagctatcgctcgtggtccgctgggacttcatctcaatagtggctttacgctcgacacgttagcgtttcgtttgctggaagatgaattgctgattgcgctgccgggtgaggaatttacggtagccgccgtcagccacatcgatctgggcggcggtagtcagattttccgctactacactagtggcgatgagtttctgcaaatcaataccaccggcggcgaagatattgatgacattgatgatatcaagctctttgtctatgaagagagctacggtatcagtaaagagagtcactggcgcgaggcgatcaacgccaaagcgatgggagcaatgaccttaaactggcaggaaaaacgctggcagcgattttttaacagcgaagaaccgggaaatatcgaacccgtctacatgctggaaaaagtagaaaatcaaaaccatgccaaatgggaggtccataattttaccatgggctaccaacggcaagtaaccgaagatacttacgaatatttgctgctaaatggtgaggaatcttttaacgatctcggcgagccagagtggttatttagccgcgcgttgggtgtcgatatcccgctgacaagtcttcatattattggttaattacaaggacgtttacaatgcatatactggatagtcttcttgcctttagcgcctatttttttattggcgtggctatggtgattatttttctgtttatctattctaaaattacaccgcacaacgaatggcagttaatcaaaaacaataataccgcggcgagtctggcgttcagcggtacattgttgggttacgttatccccttatccagtgcggcaatcaatgcggtgagtattccagactatttcgcctggggcgggattgcactggtgattcagttactcgtttttgctggtgtcagactttatatgcccgcattaagcgaaaaaattattaatcacaataccgcagcaggaatgtttatgggaaccgccgcgctggctggcggtatttttaacgcagcttgtatgacatggtaatggacgatcatggccagaaaacgcaaaagtagaaataacagtaaaattggtcacggagcgattagtcgcattggtagaccgaataatccttttgaaccgtgccgcaatcgctacgcacaaaaatacttaacgttggcgctaatgggcggtgccgcttttttcgtattgaaaggttgtagcgatagtagcgatgtcgataacgacggcgacggaacgttttacgcgacagtgcaggattgtattgatgacggtaataatgccgacatttgcgcgcgtggctggaacaacgccaaaacggcattttatgccgatgttccgaagaatatgactcagcagaactgtcagtctaagtacgaaaattgctactacgacaatgttgaacagagttggatcccggtcgtttctggatttttgttaagccgggttattcgtaaagatcgcgatgagccgtttgtttataacagcggcggttcctcttttgctagccgcccagtctggcgcagcacttctggtgattactcctggcgctccggttctggcaaaaaagagtcttactctagcggcggctttaccaccaaaaaagcgtctaccgtttctcgcggcggctatggtcgttcttccagcgcccgtgggcattggggaggctaatcatgctgagacacaacgttcctgtgcgacgggatctggaccagatcgccgctgacaacggtttcgactttcatatcatcgacaatgaaatctattgggatgagagtcgggcttaccgttttactctgcgccagattgaagagcagatcgaaaaaccgactgcggaactgcatcagatgtgccttgaggtggtggatcgcgcggtaaaagatgaagagatcctgacgcaactggcgatcccgccgttgtactgggatgtgatcgctgaaagctggcgcgcccgcgatcctagcctgtatggacggatggattttgcctggtgtggcaatgcgccggtgaagctgctggagtacaacgccgatacgccaactagtttgtacgagagcgcttattcccagtggctgtggctggaggatgcccggcgcagcggcattattccgcgtgatgccgatcagtacaatgctattcaggaacgcctgattagtcgctttagcgagctttacagtcgggaaccgttttatttttgctgctgtcaggacaccgatgaagacaggagtaccgtgctgtacttgcaggactgcgcccagcaggcagggcaggagagccggtttatctacattgaagatctcggtttgggcgtcggcggcgtactgaccgatcttgatgataatgtcatccagcgtgcatttaagctgtatccgctggagtggatgatgcgtgacgataacggtccgctgctgcgcaagcgtcgcgagcaatgggtggagccgttatggaaaagtatcttgagtaataaagggctaatgccgctgctttggcgcttcttccctggtcatcctaatcttcttgcgtcctggttcgatggcgagaaaccgcagattgccgctggcgaaagctatgtgcgtaaaccaatctatagccgcgaaggcggcaacgtcaccatttttgacggcaagaataacgttgttgaccacgctgatggtgattacgccgatgaaccgatgatctaccaggcgtttcaacctctgccgcggtttggcgatagctacacactcatcggtagctggattgtcgatgatgaagcgtgcggaatggggatccgtgaagataacacactgatcaccaaagacaccagtcgtttcgttccgcattacattgctggataagaatgttttagcaatctctttctgtcatgaatccatggcagtgaccatactaatggtgactgccattgatggagggagacacagtgcactggcaaactcacaccgtttttaatcaacctataccattaaataacagcaacttatacctgtctgatggcgcgctctgcgaagcggtaacgcgtgaaggtgctggctgggatagcgattttctagccagtattggtcagcagttaggaacggctgaatcccttgaactggggcggctggcgaatgtgaatccgcctgaattattgcgctacgatgcgcaaggacgccgtctggacgatgtgcgttttcaccccgcctggcacctgctgatgcaggcgctatgtaccaatcgggtgcacaatcttgcctgggaagaagacgctcgctccggcgcatttgtggcgcgcgcggcgcgttttatgttacatgcgcaggttgaggcagggagcttatgtccgataaccatgacctttgccgccacgccattgttgttacagatgttacccgcgccgtttcaggactggaccacgccgctattgagcgatcgctacgattctcacttattgccaggtgggcaaaaacgcggtttgttgattggcatgggaatgacggaaaagcagggcggttccgatgttatgagcaacaccacccgtgcagagcgtctggaagatggctcttatcggctggtggggcataaatggtttttcagcgttccgcaaagcgatgcgcatctggtgctggcgcagaccgcgggtggtctgtcctgcttttttgtgccgcgctttttgcctgacgggcaacgcaacgcgattcgcctcgagcggctgaaagataagctgggtaatcgctctaacgccagttgcgaagtggagtttcaggatgccattggttggttgttggggctggaaggggaaggaattcgtctgatcctgaaaatgggtgggatgacgcgttttgattgcgccctgggtagccatgccatgatgcgccgtgcatttagcctggcgatttatcatgcacatcaacgccatgtttttggtaatccattgatccaacagccccttatgcgtcatgtcttaagtcgcatggcacttcagcttgaagggcaaacggcgttgctgtttcgtcttgcgcgagcgtgggaccggcgtgccgatgccaaagaagccctgtgggcgcgtttatttacgcctgcggcaaaatttgtgatctgcaaaagaggtatgccgtttgtggccgaagcgatggaggtgctgggcggcattggttattgcgaggagagtgagctgccgcggctttaccgggagatgccggtaaacagtatttgggaaggttccggcaatattatgtgcctggatgtgttgcgcgttctcaataagcaagcgggcgtatacgacttattgagcgaagcatttgtggaagtgaaagggcaggatcgctattttgatcgcgcggttcgtcgtttacagcagcagctgcgtaagccagctgaagaactggggcgagagattactcatcagctattcctgctgggctgcggtgcgcaaatgttgaaatatgcttctccgccaatggcgcaggcgtggtgtcaggtgatgttagatacgcgcggcggcgtacggttgagtgagcagatccagaatgatttattgctgcgggcgacggggggagtgtgtgtgtaagcgtatacgactgatgcgacgctggtttcgattaactaaatgaaatatgtgaaaattgtaggccggacaaggcgctcgcgccgcatccggcattgttcatttgctgtagatgacactcatgcatacagtatcgcctgtacgcgccagttatcaggctgctggtcttcgtacatggtaataatgcggtaccaactcgcaccttgttcatcggcctttaacgccacgatacgttccacgtcctgcggatccccactaatattgctaacactgatctgacctatttcattcaggcccgtcacgcagtcagcactggcgaattctgcagactgtgccgtggcgctcgcaggataagtcactaattgcaggctgggactggcaagtaattgtttcatcgtcagctccatttttcgtttccccacatgttgcagggcattccatcgcggtaataaacgcccaggcttccagccggtaatttattgtgcacaggtaaacgcatagggacgcaaagcaatgtaaagctgactatgtaagttgtctgatttatttacggtacaaaatggcttgactataccactgtcctgtcacgatggtttcgtccaccatgacgacaacgtaataatcagcttttgcagcgacagctttcgctttgatttctgctaatgcgtcatccggagaaccccgaaccatcgtgcttacgctacctattcgctgtaacccttgcgtctggtcgcggcgaatctcttgcggatggtccgttactggcggtgctggctgtggcgtaccttgcagtgcgctacaggcacttaacatcaacaccaataataaactggcaaaccggtaaataacgctattacgtttcctgctaaccatagtgtagtgccttattaatttaactttgggggaatgttcccgaattgttacctggtacgcgattttcgaatgaaaacgtgacgaaagcgtaacccacatctcaacattatgaactaataccgccagcagaaacttgtgctaaggatttcttcatgtcataccagacaaaaaggagagacagatgattgaaatagaaagtcgcgagctggcagatattcccgttcttcatgcttatcctgtcgggcaaaaagataccccgttaccgtgcgtaattttttatcacggctttactagttccagtctggtgtatagctattttgccgttgcgctggcgcaggctggtttgcgggtgatcatgccggatgcgcccgatcacggtagccgttttagtggtgacgcagcgcggcggttaaatcaattctggcaaatcttgctacaaagtatgcaggaattcactactttacgtgcggcaatagccgaagaaaactggctgcttgatgaccgtctggcagtcggtggcgcgagcatgggcgcgatgacggcactggggattaccgctcgccaccccacggtgagatgtaccgccagcatgatgggaagcggctattttacaagtctcgcccgtagtctgtttccaccgctgatacctgaaacggcagcacagcagaatgaattcaataacattgtcgcgccactggcagagtgggaagcgacaaaccacctggaacaacttagtgacagacctctactgctgtggcatggcctcgacgatgacgttgtgcctgccgacgaaagtctacgtttgcagcaggccttaagcgagacgggacgggataaactgctaacctgtagttggcagccaggcgtgcgtcaccgcattacgcctgaggcgttagatgctgccgtgacatttttccgccagcatctttaaacacgcagaatgctgaccccttgcgcttccagttgttgcaggatttccgggttagcatttttgccggtgataagcatatcgatttgatcggcacggctaaaaagcattcccgcgcgttcgccaatcttactgctatcaaccagtaccaccagtttccctaccacgctcagcatcttctgctctgccattgctgtcagcatatcggttttatacaacccttctgcggtcagcccttttccgctggtaaacatccagtgcccggcatagagactgttttcgctgccctgcgggcttaaagtgatggactgacttttgttgtactgtccgcccataatgatcacgctgtcatgttcttgatcgatcaggtaatttgccagcggtagataattagtgatgatttgcactggcttgccacacatttcccgcccaagcagaaacgcggtggagccgcagttgatgactacgctttcgcccggattaaccagctggctggccgctttagcgatacgtactttttcatcgtgattctgcgcctgatgcagattcatcggcgtccagcgcgggcgctgttgggtaatagcttctgcgccattgcgcacttttttcagtttgccgctttcgtcaagtttattgatatcgcgtcgcgcagtggcagggctaattcccagacgctcaacgactttctcaacggtcacaaagcccaattgtgcgagcatttccaggaggatttgatgtctttgtgcttcagtcatgagctattccgataaaatttgatttttttagatgatatttgaaatagccaggaaatactacgccggatagcgcgaacttctccacgctacccggtataaacgacagattacaggaaactcttgaacggcagatccggttcaatagtgaagcaatcatcgaaaccgcgcggatagtggtactcgaagttgtctttatccagcggccaggtaaatttgccacccacctgccagataaacggcttgaagccatacttcaggcgatcttttttcatctcccacagcacgcggatctcttgcggatcggcctggaagttactccagatatcgtggtggaacgggatcactactttcgcattcagcgcttcacccatacgcagcatatcggcgctggtcattttgtcggtgataccgcgcgggttttcgccgtagcttcctaacgccacgtcgatctgatgttcgttaccgtgcttcgcataatagttagagtagtgggagtcgccgctgtgatacagggagccgccaggcgttttgaacaggtagttcaccgcgcgatcgtccatgccatctggcagtacgccagccgctttttgatcggcaggcagggtgatcagtgcagtacggtcgaaagcatcaagcgcatgaatttcaatgtctttcacttttactacatcgcccggtttgaccacgatgcaacgctctttcggtacgccccagccaatccacaaatccacacaggttttcggtccgataaacggtacgtcatctgcacaattctgcatcacggcagcagcgacgttaacgtcgatatgatcgttgtgatcgtgagtcgccagtaccgcgtcgatctggcgaatcgcaaacggatcaagaacaaacggggtggtacgcaggtttggctgcagttttttcacgccagccatgcgctgcatctggtgaccctgtttcattaacgggttaccgtgactttgtttgccagtgccgcaccagaaatcaacgcaaacgttggtgccaccttcgcttttcaaccagatcccggtgcagccaagccaccacatcgcaaatgtgccaggagcgacctgttcttgttcaatttcttcattcaaccagctaccccactccgggaaagtgctcaggatccaggattcacgggtgatacttttcactttactcatcgccatttaccttcatgatagttcaattcgaatcaatatgtgattggttttgattaatcctgacactattttttcaggaaggcaatgaccattttttgactttttgccagggaagttgttgttgattttgagtatggaaagatttaatggaatgtgtaattcaattaactaaatgaatttaaatggataattgtttcgttgtgtgaatcccactctatccatgtggaattatttgcgggtcgcgtcacatttaatcataaataatcttgttgtgattacttttgaaaattagagtgagtgcacaacattccgggtgtgtggaatacccggttacctcttcttcaggagatcgttatggagatcctctacaacatctttaccgtgttttttaaccaggtcatgaccaatgccccgttgttgctgggtattgtgacctgtctgggctacatcctactgcgcaaaagtgtcagcgttattattaaaggcacgattaaaaccataattggtttcatgttgttgcaggcagggtccggcatcctcaccagcaccttcaaaccggtggtggcgaaaatgtccgaagtctacggcattaacggcgcaatttccgatacctacgctagtatgatggcaaccatcgaccgcatgggcgatgcctatagctgggtgggttacgccgtattgttagcgctggcgctgaacatctgttacgtgctgttgcgtcgcattaccggcattcgcacaatcatgttgaccggccacatcatgttccagcaggccgggttgattgccgttacgctgtttatcttcggctactccatgtggaccaccattatctgtaccgcgattctggttagcctctactggggcatcacttccaacatgatgtacaagccgactcaggaagtgacggatggctgtggtttctccatcggtcaccagcagcagtttgcaagttggattgcctataaagtcgcgccgttcctcggcaaaaaagaggagagcgttgaagacctcaaattgccgggctggctgaacattttccacgacaacatcgtctccacggcgattgtgatgaccatcttctttggtgccattctgctctccttcggtatcgacaccgtgcaggcgatggcaggcaaagtgcactggacggtgtacatcctgcaaactggtttctcctttgcggtggcgatcttcatcatcacgcagggtgtgcgcatgtttgtggcggaactctctgaagcatttaacggcatttcccagcgcctgatcccaggtgcggttctggcgattgactgtgcagctatctatagcttcgcgccgaacgccgtggtctggggctttatgtggggcaccatcggtcagctgattgcggttggcatcctggtcgcctgcggctccagcatcctgattattcctggctttatcccgatgttcttctctaacgccaccatcggcgtgttcgctaaccacttcggcggctggcgtgcggcgctgaagatttgtctggtgatggggatgatcgaaatctttggttgcgtctgggcggtgaaactcaccggtatgagtgcctggatgggcatggcggactggagcattctggcaccgccgatgatgcaaggcttcttctccatcggtatcgcctttatggccgtcatcattgtaattgcactggcttatatgttcttcgctggccgcgcgctgcgcgcagaagaagatgcagaaaaacaactggcagaacagtctgcttaataaggagttttgattatgaccgtacgtattctggttgtgtgtggcaacggacaaggcagttccatgatcatgaagatgaaagtggaccagtttttaacccaaagtaacattgaccatacggtaaacagctgcgcggttggcgagtacaaaagcgagttgagtggcgcggatatcatcatcgcttctacgcacattgcgggcgaaatcaccgtgaccggcaacaaatacgtggttggcgtgcgcaacatgctctctcctgccgactttggcccgaaactgctggaagtgatcaaagagcatttcccgcaggatgtgaagtaaggacgcgccatgaaattacgtgatagcctggcggaaaataaatccatccgcctgcaggctgaagcagagacatggcaggaagcggtgaaaatcggcgttgacctgctggtggcggcagatgtggtagagccgcgttactaccaggcgattctggatggcgttgaacagttcggtccttatttcgttatcgctccgggcctggcaatgccgcacgggcgtccggaagagggcgttaagaaaaccggtttctctctggtaacgctgaaaaagccgctggagttcaaccacgatgacaacgatccggtggatatcctcatcaccatggcggcggtcgatgccaatactcaccaggaagtgggcatcatgcagatcgtcaacctgtttgaagatgaagagaattttgaccgtttacgcgcctgccgtaccgagcaggaagtactggatctcattgaccgcaccaacgcggcagcttaagaaggaattgaacatgagtttaccgatgttgcaagtcgcgctggacaaccagactatggatagcgcctacgaaaccactcgcctgattgccgaagaagtcgacattatcgaagtgggcaccattctgtgcgtgggcgaaggcgtgcgtgcggttcgtgacctgaaagcgctctacccgcacaaaatcgtactggcagacgccaaaattgccgatgcaggcaaaatccttagccgtatgtgcttcgaagccaacgctgactgggtgacggtaatttgctgtgcggatatcaacaccgccaaaggcgcgctggacgtggcaaaagagtttaacggcgacgtgcagatcgaactgaccggttactggacctgggaacaggcgcaacagtggcgcgatgcaggcattgggcaggtggtttatcaccgcagccgtgacgcgcaggccgcaggcgtggcgtggggcgaagcggacatcaccgcgatcaaacgtctttccgatatgggcttcaaagtcaccgtcaccggaggcctggcgctggaagatctgccgctgttcaagggtattccgattcacgtctttatcgcgggccgtagtatccgtgatgccgcttctccggtggaagccgcacgtcagttcaaacgttccatcgctgaactgtggggctaaggagcggatatgttgtccaaacaaatcccgcttggcatctatgaaaaagcgctccccgccggggagtgctggctggaacgcctgcaactggcaaaaacgttaggcttcgattttgtcgaaatgagcgtagatgaaactgacgatcgcctgagccgcctcaactggagccgcgagcagcgtctggcgctggtcaatgcgattgttgaaaccggcgtgcgcgtgccgtccatgtgcctttctgctcatcgtcgtttcccgctgggcagtgaagatgacgcggtgcgggcgcaggggctggagattatgcgtaaagctatccagttcgcccaggatgtcggtattcgcgtgatccagctggcgggctatgacgtttactatcaggaagccaataacgaaacgcgtcgtcgtttccgtgacggcctgaaagagagcgttgagatggcaagccgcgcgcaggtgacgctggcgatggagatcatggattatccgttgatgagctccatcagcaaggcgctgggatacgcgcactatctcaacaatccgtggttccagctctacccggatatcggcaacctgagcgcgtgggacaacgatgtgcagatggagttgcaggccggaatcgggcatatcgtcgcggtacatgtgaaagacaccaaacctggcgtcttcaaaaacgtgccgtttggcgaaggtgtagtggatttcgaacgttgtttcgaaacgctcaaacagagtggctattgcgggccgtacctgattgagatgtggagcgaaacggcggaagacccggcggcagaagtggcgaaagcgcgtgattgggtgaaagcgcgcatggcgaaagcgggcatggtggaggcggcataatgcaaaagctaaaacagcaggtatttgaagccaacatggagctgccgcgctacgggctggtgacctttacctggggcaacgtcagcgctatcgaccgcgaacgcgggctggtggtgatcaagcccagcggcgttgcctacgaaaccatgaaagcggccgatatggtggtggttgatatgagcggcaaggtggtggaaggggagtatcgcccatcttccgacactgcgacgcatctcgaactctaccgtcgttacccgagccttggtggcattgtccatacccactccactcatgccaccgcatgggcgcaggcggggctggcgatcccggcgttaggcaccacgcacgccgactacttctttggcgacattccgtgtacgcgcgggttaagcgaagaagaggtgcagggcgagtatgaactgaacaccggcaaagtgattatcgaaacgctgggcaacgccgagccgctgcatacgccgggaattgtggtgtatcagcacgggccgttcgcctgggggaaagatgctcacgatgcggtgcataacgcggtggtgatggaagaagtggcgaaaatggcgtggattgcccgcggcattaacccacaactcaatcacatcgacagcttcctgatgaataaacacttcatgcgtaaacacggtcctaacgcttattacgggcagaagtaaaacacgcgctgcggaaatttccttcctcgggagataactggtctaattccgcagccgtttttcaaaaaaaagccccctgcgaagggggcaaagcaaactatggcaatgtttcgttggttatacctggtgttagcgataaatatccgcgctggcgtgcatattgccgttactccccggttcccgcatcagaattacgtggtagtacgttgcgccttgcgcatctgtttcttcatttaatgcctgacgtgcttcgctttcagtggcgaaattatgattgatataaatcacgcctaagctttgcacatcgtccatatttctggcctggtggttattaatttcaatggctgcccatgtatttgcacttagcaaaagcacagccagaagggctaaaacacgactgaacatagatacctcctcgacggctgactttgtgtgctctcctctgtgatgatcttctgatttaattttaatcaatgataaagaagttgatggtgaccatttctgatgcagttgttcaaaaaaacaccatgatgaagtgtgatgaacttcaaatcagcgtgttagaggttaattgcgaaaggggagatttatttcggctctgcccttgagtttagcgaggcatacaagtactataacgcgtcatttttcagccgacctttaacacgttccttgcctccccgggattcggctgacccagacaggaggctgaataatccgtaaggagcaattcgatgcgtcattacgaaatcgtttttatggtccatcctgaccagagcgaacaggttccgggcatgatcgagcgctacactgctgccatcactggtgcagaaggcaagatccaccgtctggaagactggggccgccgtcagctggcttacccgatcaacaaactgcacaaagcacactacgttctgatgaatgttgaagctccgcaggaagtgatcgatgagctggaaactaccttccgcttcaacgatgccgttatccgcagcatggttatgcgtaccaagcacgctgttaccgaagcatctccgatggttaaagcgaaagacgagcgccgtgagcgtcgcgatgatttcgcaaacgaaaccgctgatgatgctgaagctggggattctgaagagtaatttctgatgaccaaccgtctggtgttgtccggcaccgtgtgcagggctccccttcgaaaggtcagtccaagtggaattcctcactgccagttcgtgcttgagcatcgttctgtgcaggaggaagccggctttcaccggcaggcgtggtgtcaaatgcccgttattgttagcggacacgaaaaccaggccattactcacagtataacggtcggcagtcgcataaccgttcaggggttcattagttgccacaaggcaaagaacggactgagcaaaatggttttgcatgccgagcagattgaattgatagattctggagactaaccatatggcacgttatttccgtcgtcgcaagttctgccgtttcaccgcggaaggcgttcaagagatcgactataaagatatcgctacgctgaaaaactacatcaccgaaagcggtaagattgtcccaagccgtatcaccggtacccgtgcaaaataccagcgtcagctggctcgcgctatcaaacgcgctcgctacctgtccctgctgccgtacactgatcgccatcagtaatcggtcacggtccattaatacgactttgagaggataaggtaatgcaagttattctgcttgataaagtagcaaacctgggtagcctgggtgatcaggtaaacgttaaagcgggctatgctcgtaacttcctggtaccgcagggtaaagctgttccagctaccaagaaaaacattgaattcttcgaagctcgtcgcgctgaactggaagctaaactggctgaagttctggcagctgctaatgctcgcgctgagaaaatcaatgcactggaaactgttaccatcgcgtctaaagctggcgacgaaggtaaactgttcggttccatcggtactcgcgacatcgctgacgctgtaactgcagctggcgttgaagtggctaagagcgaagttcatctgccgaacggcgttctgcgtaccactggcgaacacgaagtgagcttccaggttcacagcgaagtattcgcgaaagtgatcgtaaacgtagtagctgaataattcgttattcaacgagacgtaaaaacgccgaccattggtcggcgttttgctttctatttttcgtcaggtattagtttcgcaagtagatccattcaccattctcttgtgtccataagtcaggatggtttgctggcgttagatacatacgagcgcaactgatgtctcgctcctgcggcactcgctcgaaacccaaaccgctgtagattgcggcactactacttaaggaacgcagaccaattttcaaatcatggggtaaatcagaatacgcgtttagcaatgcagcaatgatgaatccgagggcattagaaacgcctgtaacagtgcgaagttggtcgatataaagatcgattgttggtagttcagaactccagcaattaggcatttgggcaggaagggttacaacgtatcctatcgtttggccggtatagtctggagtaccataaccaggtcccaaaaccacttcgtgtattgtgtatttactgttgggttcgaaggattcgacatcttgcaataaatatttcagttctgcggttaacctcgcacccgcgtaagctttattgtatttctgggcgtgaatattatctaatgtagcttcatggttccatccaaaagaattatcaccattcattgtgattccatcgtaagcattacacctcgtcgctaacttattgaatgcttgccagtcactgagatctagtttgtggatctcaacagtacgtctgccatcgcaattatgatctcttccacgattactaagtaatgtagcgcgtgcgtattgatgaaattttaattttactggtttgtcggtggagctaaaacgagataaatatgcaggaaaactataaatagtcgttggtaatgtcattgtaatgttacctgtttaatgtttttataaatatcgcagctgaatgttcacagaaaaaaatcgatattaataaaaataagtttgttttctgaagtggtgaaaatagcggatggtgaaagatattaatatcaaaaatcgctcattatggatataacgatgcacccggggagaaaatgacttccacgccttacaccgtacattcttgttgtgcggtatgtaattattctacgctgtcggtatcggtgtattcgttaatcagcaggttagccagccacaaaaagccattgagaaaattattgattttacatgggattattatattgctaatccttggtttttaaaaattgtgcatagtgaaaatcaaagtaaaggtgtgcattatgcaaaaagtcagcgtctcttagaaattaaccatgcgcacttgcagttaatggaatccttattggatgaagggaagaaacacaatatttttaagccagatatcgacccattgcaggtgaatattaatattgctgcgcttggcggatattatttgatcaaccagcatacgcttggcctggtttatcacatcagtatggttagtccccaggcactggaagccagacgtaaggtcatcaaagagacaatccttagctggcttttggttgaccctagttctaccgcgcacgaataattaccgcgcacgaataaaactgccatccggctggcgggtgaacaggacctgttgattattccccgtatcaatggttaagcccgtcaccacgccgctggcgttctggcggattttcaccatctgcccgttttgcaaattactcagcggcttacccgcgccttctacctgcgccattgcatagacatcggtagcgggcagtccgtggtcgcggaacagctgcgccatcgttttaccgggttcgacacggtaagagcgccattgattatcaattccgctatctggctggaatggttgcgtttgggtagtttgcggctgctcttctggctggccttcctgtataggttctggagcgaccggagccacctgatcaggaccattttgtggggtaactaattgcgcccgcagctgttcttctgtcggcggttgactttggctctgaatatctaactgcgcttcacgcgtcaccaccggcgcgttgggcgtatcatcagatggaagcagaaatccgaccaccaatacaatggcggcaataatgatcccccgacgatgcatcggcggcagcgggtccatgaagcgaaaattgtccggcgcgtgccagactttctccagggttggttttagttcaaagcgcccgggcatggtttcctcctgctccgcgtcttgttcctcaatcatagcctatgaataagctaacgctatgatgtccgtggtaaacccgcctttattatattcatacgggatattgctattgtttctttttccctgggatttgtcatcattcccgcgacaaagttttacccaaagaagtgtggctgatatgctgcccgctactttataccctaagaaaggaaatacgatgaccaccccaacttttgacaccatcgaagcgcaagcaagctacggcattggtttgcaggtagggcaacaactgagtgaatctggcctggaagggctgctgccagaagcactggttgcaggtattgccgatgcgctggaaggcaaacatccggctgttccggttgatgtggtgcatcgcgcgctgcgtgaaatccacgagcgcgccgatgccgttcgtcgtcagcgtttccaggcgatggctgctgaaggtgtgaaatacctggaagaaaacgccaaaaaaagaaggtgtgaatagcaccgaatctggcctgcaattccgcgtgatcaaccagggtgaaggcgcaattccggcacgtaccgaccgcgttcgtgttcattacaccggtaaactgatcgacggcaccgtgtttgacagctccgttgctcgtggtgaacccgctgaattcccggttaatggcgtgatccctggctggattgaagcactgactctgatgccggtaggttctaaatgggaactgactatcccgcaggaactggcatatggcgagcgcggcgcaggcgcatccatccctccgttcagcaccctggtgtttgaagtcgaactgctggaaatcctctaagcagcgcattctgttcccctcgaacgagaggggagcaggcattcagcaataaacccttcagtttgccaaacggcgctattttgtgttgcaaagaccccgtaagcgtgtatttttgtgagctgtttcgcgttatcaccgtgatatgacactcactttaaacataaaattaacattagatctaaatcttagtattcatcccgcgtattgttacctaatatcgatgagtcccgatacagattcgtcgtatcatagactgactaaaggccgtagagcctgaacaacacagacaggtacaggaagaaaaaaacatggtagatcaggtaaaagtcgttgccgatgatcaggctccggctgaacagagcctacggcgcaatctcacaaaccgacatattcagcttattgccattggcggtgccattggtacggggttgtttatggggtctggcaaaacgattagccttgccgggccgagcatcattttcgtttatatgatcattggttttatgctctttttcgtgatgcgggcaatgggggaattgctgcttagcaatctggaatacaaatcttttagtgacttcgcttccgatttactcgggccgtgggcaggatatttcaccggctggacttactggttctgctgggttgtaaccggtatggcagacgtggtggcgatcacggcttatgctcagttctggttccccgatctctccgactgggtcgccagcctggcggtgatagtgctgctgctgacgctcaatctcgccaccgtgaaaatgttcggtgagatggagttctggtttgcgatgatcaaaatcgtcgccattgtgagcctgattgtcgtcggcctggtcatggtggcgatgcactttcagagtccgactggtgtggaagcgagtttcgcgcatttgtggaatgacggcggctggttcccgaaaggtttaagtggcttctttgccggattccagatagcggttttcgctttcgtggggattgagctggtaggtacaacagctgcggaaaccaaagatccagagaaaagtctgccacgcgcgattaactccattccgatccgtatcattatgttctacgtcttcgcgctgattgtgattatgtccgtgacgccgtggagtagcgtagtcccggagaaaagcccgtttgttgaactgttcgtgttggtagggctgcctgctgccgcaagcgtgatcaactttgtggtgctgacctctgcggcgtcttccgctaacagcggcgtcttctctaccagccgtatgctgtttggtctggcgcaggaaggtgtggcaccgaaagcgttcgctaaactttctaagcgcgcagtacccgcgaaagggctgacgttcagctgtatctgtctgctcggcggcgtggtgatgttgtatgtgaatcctagtgtgattggcgcgttcacgatgattacaaccgtttccgcgattctgtttatgttcgtctggacgattatcctttgcagctaccttgtgtatcgcaaacagcgtcctcatctacatgagaagagcatctacaagatgccgctcggcaagctgatgtgctgggtatgtatggcgttctttgtgttcgtggtcgtgttgctgacactggaagatgacactcgccaggcgctgctggttaccccgctgtggtttatcgcgctggggttgggctggctgtttattggtaagaagcgggctgctgaactgcggaaataaccgcattatcatgctggatggcgcaatgccatccagcttttagatcactcacccgccagcgcgcgtgggaacagtacattgttttccagactgatgtgatccatcaggtcatcaatcagttcattaatgccgttatacatcgctttccaggtggtgcaggcttctggcggcggtgtgacgttattggtggtgtgtttaatcacttccagcagttcgcccgcttcatcgtgctcgctttccattacgctgattggccccattgcctggctgcccatgccttgtttgatcatcgggaagaggatctgctcttctttcatcatgtggctggaaagctcttcatgcagcatggtcaggtattttgtcagcccttttggcacgctcggtttgtcggcgtgaacgcgctcgactttagtcgcttgcagaatcagctccggcagttgctcgcggtgacgatcgtggtagcgcacgatgatatggtcgatgatttctgccagcggggcgctacgccagtctttctcaatcggttgttcagcgagctttgccagttcagcttcaatgacctcaacatccagttctttacgtgccgccgcgcgcgccagcgtctgcttaccgccacagcagtaatccatatcatatttacgaaacagagcactagcgcgaggaatagagagcgccagttcacctaaaggttggtcgcgataagccatagctgatacctcattcttaataagataagatgtattttaaatgcatctttaaggcaaaagctataacccttacgtagcagaggcttatttaactcactgccagcgtgtcaactttcactgacagattcagttaaaggtttttctggttttgctctgaccgcgatgaccacgccaatcactaacagcgcgataccgctcagcgtcattagcggcggcatttgctggcggagtaaaaaggtgtacagcaaacctgccagcgtttcgaaaacaatcagcggcccgagaatcactgtcggtaatagctggctggcgacgttccagcagagtgcgccaacccaactgcaaagcacggctatcgcaaccatcagactaataaacaccagcggacgggggccaaagggtagggagaagtccggcgtttgcgtattcagccagtaacaagcgacgagatagccgataagactaaccggcagtgtgaccagcgcctgcgctgttgcccacatcatcggatgtttgtcgggattttcccgcagccagcgggcgttgcgcagggcataccacgcccagcagaccacggaaactaacgccagcacgatgccagaggtataacgtgcccagtcaaaatcggggagtccgtggtttaactcagcaatattcacacacgccaggccgatgccaatacaaatcagtgctggggcgagttttccccacgcgagtttgccgtcgcgctggctataaagcagattggcaaagacaggaatgaccaccggcagggtgccgataatcatcgtggaaacaggcgcgccagtacgttgaatggcactggcaaggcagaagtaatagatgaggttgcccatcatagtgagcatcaaggcggtaagccagtcgcgacgcgccaactgacgcagacgcacgcgtcccagccaggcaatgggcagcgcaattaaccctaacgccagataacgccccatgctctgcaacatcgccgggtattccggcacgatcaacggcccgacaaaaataagcccccacatcaaccctgctaacagggcgtacagcacgccgctaatcattactggcatccattgatctgtcagaagaaagttcaggaagcagacatgattgctcccggcatcccgtcattatcagagaggatgcgggaggatgccactttaattaattagttattaacattaaaaagatggcttacgctttcggctaacgttgtcgttgggtggccaatcaatttgctaagtgttttgctgtcatcaaacagaccgcctttgcttgcgccaacgtcagaatccgccagcatatccgccagtccgtcgggcagtccgacgcttttcagtgccgcggcgaaatcggcttcgctcagattttgataggtaacctgtttgccgctctgtttggtcagctctgccgctaactgtgtcaacgtccaggcactatcgcccgccagttcgtaaaccttgccttcgtgaccggcttcgctaatcacgcgtgccgcagctgccgcataatctgcccgcgttgcactggcgattttgccatcgcccgccgcaccgataaatacgccgtgttccagtgctgccggggcgctggcgaggtagttttcgctgtaccagccgttgcgcagcagggtgtaaacgatgccagaatcagccagcattttctccgtctcgatgtgctcatcggcgaggccgagcggggaggtatctgcatgtagcaggctggtataagcgataaatttcacgccagccgcctttgcggcattaataacattacgatgctgcggggcacgttgacccacttcgctggaagagatcagcagtagtttttccactccctgaagtgcagatgtcagtgcggcttcatcgccgtagtcagcctgacgcacggtaatgccttgtgctgccagggcttgggcttttgccggattacgaacgatagccactatttggctggcaggaaccgttttcatcaaggattcaataacatagtgaccaagttggccagtggcaccagtaatagcgatcatgggaagtctccatcgttttgtcttgtgtttaaatacgctaacacctaaacttacttttagtaagtacgtacaaaaaggtaagtatgaaatgagtcaggttagcctgagccaacaactgaaagagggtaatctctttgcggaacagtgcccgagccgcgaggtgttgaaacacgtcaccagccgttggggggtgttgattctggtggcgctacgcgaaggtactcatcgctttagcgacctgcggcgcaaaatcggtggggtgagtgaaaagatgcttgcgcagagcttacaggcgttagaacaggatggttttcttaaccgtatcgcgtatccggtggtgccgccgcatgtggaatatagcctcacgccgctgggcgagcaggtgagcgaaaaggttgctgcactggcggactggattgagttgaatttgcccgaggtgttggcggtgcgggatgaacgtgcggcataactgccggatgcgctgagcttatctggtctacggtgcatggcttgtagggcggataagatgcgccagcatcgcatccgccaataaatgccggatgcggttgatgatttataggccgaaaaagaagtgttttacttactcaaatccacctgataaatcgcaaacccgatatcatcggtcgcgactttattcatcggatactgccctttctctttaataaacgctgcggctttatcactcggagaggtttcgaaacggatatccagtttcttatcgccagctatcggtgctaaacgccagttgttatctgccgccgggtgaatttcccccgcacgtttgctctcatcagcaatccacgctgccagcacgctgcggttctcatccggactagcaaaagcgatatggctgtcgcccgtaccggcaaatttgccgccgtaagcgcgatagttattggtggcaaccaggaacatggcgttcggatcaatcggcttgccattaaaggtcaggttcttaatcctttccgcattggcattaatcatctggcactcgccgtcataacgggcgggctgggtaacatcaatctgataattcacaccatcaataacatcaaagttataagtgcggaaaccatcccagttgatgagactctgtggtttcgtgctgttgggatcaatctggttaaactgtcccgcggagcactccagccactctttcacctctttaccgctggctttcaccacaatcagcgtattgggatagagataaagatcggcggcattacggaaggtcaactggcctttttccacctccacatagcttgccgggtcatttttgcgaccaccgactttaaacggtgcggcagcactaagcaccggcagttttgccagatccggatcgccctgaatgtaatgctcgacatacgctttttgcgcgttgttcaccacctgcacggtcggatcgtcctgcaccagcgccagatagctatacatattgtcggcagatttaccgattggcttgctgacgaactggcgtgtggcatcgtgatcggctttgagtgtttctaccagcttgctgtcttccgccgcgagggattttttattagcgatgtcgtaaatcggtcgtgcttccgctttcgcctgcgtcacctgccatttaccgctgtcattactgagttgtaagtcgaccacaccaagatgatcgccccacatgcctggcattaccgccggaacaccattcagcgtgcctttggcgatatcagccccttcgatatcagcaaaatctttacctgggaaaacggcgtgagcatggccaaacataatggcgttaacgcccggaatttcactgaggtaataaacactgttttccgccatcactttatacggatcggcagatagcccggaatgtgccagaacgacaacaacatcggcacctttctcgcgcatttcaggcacgtatttgcgcacggtttcggtaatatcattcaccgtcactttcccggataaattagctttatcccagcccatgatttgtggtggcacgacgccaatatagccaatcttcagcgtctgtttttttccgtctttatcgaccacttcggtgtctttaattaaatacggtgtaaacattggctgtttggttctggcgtcaatgacgttggcatttacataagggaatttcgctcctgccagcgcatttttcaggtaatccagaccgtagttaaactcgtggttgccaagcgttccgacggtatagtccagcgtatttaatgccttatagaccgggtgaatatcacctgcttttaatcctttcgcgctcatgtaatcggccagcggactcccctgaatcaaatcgccgttatcaaccagtacgctgtttttcacttcattgcgggcatcgttaatcaggcttgccgtacgtaccagtccgaatttttccgtggcggtgtctttgtaataatcgaaatccatcatgttgctatgcagatcagtggtttccatgatacgcagatcgaccgtcgctgcattcacactggcggcaatcagcgtggccaggagcgttgcgctaaacttaatcatcagggacatccttttatcatcgggaatacgaaagaaaagggagaataaacgtcttacttatagaacagtgaagaatgccacaattttacgctttgaaaatgatgacactatcacagttggcgcattcattaacgatagggtataagtaaaacaataagttaacaccgctcacagagacgaggtggagaaatgttagatcaagtatgccagcttgcacggaatgcaggcgatgccattatgcaggtctacgacgggacgaaaccgatggacgtcgtcagcaaagcggacaattctccggtaacggcagcggatattgccgctcacaccgttatcatggacggtttacgtacgctgacaccggatgttccggtcctttctgaagaagatcctcccggttgggaagtccgtcagcactggcagcgttactggctggtagactcgctggatggtactaaagagtttattaaacgtaatggcgaattcaccgttaacattgcgctcattgaccatggcaaaccgattttaggcgtggtgtatgcgccggtaatgaacgtaatgtacagcgcggcagaaggcaaagcgtggaaagaagagtgcggtgtgcgcaagcagattcaggtccgcgatgcgcgcccgccgctggtggtgatcagccgttcccatgcggatgcggagctgaaagagtatctgcaacagcttggcgaacatcagaccacgtccatcggctctagcctgaaattctgcctggtggcggaaggacaggcgcagctgtacccgcgcttcggaccaacgaatatttgggacaccgccgctggacatgctgtagctgcagctgccggagcgcacgttcacgactggcagggtaaaccgctggattacactccgcgtgagagcttcctgaatccggggttcagagtgtctatttactaaattcagatggcagaaacagtgtatttcctgattctgccatcctgatttctcccaacctaaaaagttataaataaaaagagattgtatttaaagtgcaaaaattcaattgctaataagttacattttaataatgagcgttttttgatagtttacttctatagtgagatatttaatggcgacataaagtaaccaaataaaataaggttgtcatatgttacccaggatcagacacaataattttattggtgcggtggagttatttgtaaagtctagctatacaaaaacacatagtaacaatttttttaacaacatccatcatgcatttaagaaaaaagattggattagcaattatgatagcctgttaactttgagggagttctttcgttgcgcaactcagattgataaaagtggttatcaggtgcttagtagtaaaaatgaaactgttcacgccatggataagtttcttatcagtttcagccttaaagataacggtgccgaatatacaatgacattgcgaggtagtggatttgaatacgaagaaatacccataacaataaatgaatataacagtttcatggatttcaaaaaccgtgaatttccgttagaacaaaacagacgattgtatgcccgggatattctacagaaaaaacagtctgacataccgaaaaggattaaaggttatattcaccaggcgattggtgacgtgtctttaggttatgccttattggaggatatagtaagcaaattaaaacggggtaaatttgaactccaaataccaggaggtggaattaaagaatgcgatggatggtatatttacgaaaaaataattgatgataattttgccatagtcatagaatctttgggctttgcgcttaaaatctatggaggggatgaacgttttcgtaatggttcctctgttgttttggaggatgaagattactctcttatttataattttctggttaatgcaggttgccaacaagtcgaattagccgaacaagtggatgcgatagtaagtgcgaatctggccgcagatagcgatattaccaaagaaaagatttgcgagaaatataaaagcaccattgaggcgtttaaaaaagagcaactagcgttaccagtattagttcggcgtaagaacagtgagacttaattcccctatcccatagataacgataggggaaaattatttttgcagaatttatgttattgccattatttgagcaacttttgcagcaggtccatcacttgctgcacctcttccggtgtgagcgccccgtctttggcccattgcacgcgaccatccttatccagcaccactacagcggaactttcttcatccagctgccaggcaccgagcgcgacgccattgctatcgacaataaactggctccagggataaagctttttattactctccagactgctgcgcacaaacatcccactacccggaatcgcgtcgtcggtgttaacaatggtggtggtctggtaacgatcgtgcggtaacttcgcacttttaatcgcttcaatcagcgtcgcgtttttctcttttgcagaggtgcgaccagcaatatgttgcagtactcgcacttttcccactaactgcgcgctgttccaggttttgtagctaaactgatctttatcaagcaccaactcgccccgatcggtaatgccaatcggcggcactcgctgaccggtttcgaactgatgtgcggaagccatcatcggcaacagcaggcaggtgagtgccagaatcttgcgtagggtcatggtgtttccttcttatgatatgcaggtgatccgaccacttgggtctgagttttaatcatatgtgctatttatcgaatttcccgcaagtgtgatgccagtttgcggtcaagcgcacaaatcatatgaaaaatgaatgcttatactgaagaccgcgcttcggtaaaaagataattctgaataattgtaacctttaggtaaaaaaagttatacgcggtggaaacattgcccggatagtctatagtcactaagcattaaaatttgcgcctcataatagttgggccgattgtggcaccgcacaggcgtaatactcagcaggagataacaatgaaaattttccaacggtacaacccacttcaggtggcgaagtacgtaaagatcctgttccgtggacggttatacatcaaggacgttggcgcttttgaattcgataagggtaagattcttatcccaaaagtgaaggataagctgcatttgagtgtgatgtccgaagttaaccgtcaggttatgcgtctgcaaacagagatggcttaaccaaagtgctatgcagtaaaaagtgctatgcagtaataagacggctcctgattcaggagccgttgatgtttctgggggttacgcgacgctttcttctttatctttagcgtcaggcagttttgggctaagggcggtggccttgctgtcgatccgggtcaccagcagctggtcgatgcggtagttatcgatatccaccacttcaaatttgtagccggcgaatttcacgctatcggtgcgtttcgggatcttacgcagcataaacatcataaagccgccgatggtttcgtagttgccgctctgcgggaactcgtcaatatccagcacgcgcatgacgtcgtcaattggggtgccgccgtcaatcagccaactgttctcatcacgggcgacaatctgctcttccagcccctgaccgaccagatcgcccatcagcgtggtcatcacgtcattgagggtgatgatccccaccaccagcgcgtactcgttcatgatcaccgcgaagtcttcacctgcggttttaaaactttccaacgcctcactaagggttaacgtatccggcacaatcagcgtgttgcgaatttgtacgccgctgttcagtgccaggctttggttagccagcacgcggttcagcaggtctttagaatcgacataaccgatgatgtggtcaatatcttcattacagacgaggaacttagagtgcggatgttccgccaccttattcttcaggctttgctcatcttcgtggagatcaaaccaaatcacgttttcacgcggtgtcatactagacggaacggtacgggattccagctcaaagacgttttcaatcagctcgtgttcctgtttacgtaacacgcccgccagcgcaccggcttccactaccgcgtagatgtcatcagaagtgatgtcatctttacgtaccattggcagtttgaaaatacggaagattatgttcgccaggccgttgaagaaccacaccagcggggtgcaaacgtacaggcagaagcgcatcgggttgatgatacgcaaagccacagcttctggcgcaatcataccgatgcgtttcggggttaaatccgcaaacaggataaacatgccagtcactaagctgaaagagagaataaagctcagttgctcagagagctctgcgctcatatagcgggagaacaggctgtgaaaagctggagaaaatgccgcatcaccgacgataccgccgagaatcgccactgcgttcagaccgatttggaccacggtaaagaacatgccgggattttcctgcatattcagaacgcgttgggcatttatattgccttcatcagccagcagtttaagtttgattttgcgactggcggcaaggctgatctcggacatgctgaagaacgcacttacagcgatcaagcagagtatgactaaaatactgtttaacatatcttatccgacctttcaggccagatcctcggaaggggaagttgattaatttgtgtgaaatacacattgaaagccgattcgaagaaagtgaaccggcattttcagtggctagtatagcgtaaggtactgtaaagccgccagagggttaaaattcagacagctgaaaaatgcaaaactgcctgatacgctatgccgatcaggcctacgcagtccttgcaatatattgaatttggacgattttgtaggcctggtaagtcgtttacgccgcatcaggcatagacaaagagcactttatcaacaaactacatttgtacccgtaacgttatgcttccggcggcagacagacgccaattccgccaattccacagtaaccatacgggtttttatgcagatattgctggtggtcatcttcggcataataaaacggtgtggcgttagcgatttccgtggtgatgtgacgatcgtcatcggcggcaagcatcgccgcctgaaaacgttccagactggcgcgagctgcggcatcctgttctggggtcagcggataaatcgcactacgatactgcgtgccgtggtcattgccctgacgcattccctgggcgggatcgtgattctcccaaaatacctgtagcaactgctcatagctgatgacggaaggatcgtaaacaatgcgtaccgcttcggcatgacccgtatcaccggagcacacttcccgataagtcggatttggcgtatagccgccggtatagcctgcggcggtgctgtaaacgccgggtaactgccagaacagacgctccacaccccagaaacaacccatcgcaaaaatggcaatctccattccgtcaggtacattggtcatactgtgaccgttgaccgcatgcagcgtggctacgggcatcggggtgttacgtccaggcagggcatcggcgggggaaaccagatgctttttatcaaataaactcatggtgtcgctctcccgaaaatcggtcattggggttaaggttgtaacaagaggcgtatttgcacacaataaccaccgtgaataggtctaaagtaaaacataagaaatatttggggtttagtctgctttttaatccatattactggatttttgttaagccgtttaacggcgttccaggggcaggaaaaaaggatattcaggagaaaatgtgcgctatatccgacagttatgctgtgtaagcttactctgcttaagcggatctgccgtcgccgcgaacgtccgtctacaggtcgaggggttaagcggacagctggaaaagaacgttcgtgcgcagctttctacgattgaaagtgatgaagtgacgccagaccgtcgctttcgcgcacgcgtcgatgatgccatccgcgaaggtctgaaagcgctgggttattaccagccgaccattgaatttgatctccgtccaccgccaaagaaagggcggcaggtattgatcgccaaagtcacgccaggcgtgccggtgttaattggcggcaccgatgtggtattgcgcggcggcgcgcggaccgataaagactatttgaaattgctcgatactcgcccggctattggcacggtactgaaccagggcgattatgaaaatttcaaaaagtccttaaccagcattgcgttgcgtaaaggttatttcgatagcgaatttaccaaagcgcagctgggcattgcgctcggcctgcataaagccttctgggatattgattataacagtggcgaacgttaccgctttgggcatgtgacctttgaaggaagtcaaatccgcgatgaatacctgcaaaatctggtgccgtttaaagagggcgatgagtacgaaagcaaagatctggcagaactgaaccgccgactttctgctaccggctggtttaacagcgtggtggtggctccacaatttgataaagcgcgcgaaacgaaagtattaccattgacgggcgtggttagcccgcgaacagaaaacaccatcgaaaccggggtcggttactctacggacgtgggaccgcgcgtgaaagcgacgtggaaaaagccgtggatgaactcttatggtcacagtctgaccaccagtactagtatttccgcgccggaacagaccctcgacttcagctataaaatgccgctgctgaagaatccactggaacaatattatttggtgcagggcggttttaagcgcactgacctgaacgataccgaatctgactccactacgctggtggcttctcgctactgggatctctccagcggctggcagcgtgccattaacctgcgctggagtctcgaccactttactcagggtgaaattaccaataccacgatgctgttttatcctggggtgatgattagccgcacgcgttctcgtggtggcctgatgccaacctggggcgacagccaacgctactctatcgactactccaacacggcctggggtagtgatgtcgatttctccgttttccaggcgcagaacgtctggatccgcacactgtacgatcgccatcgttttgttacacgcggcacgctgggctggattgaaaccggtgatttcgacaaagtaccgccggatctgcgtttcttcgccgggggcgaccgcagtattcgtggctacaaatacaaatctatcgctccgaaatacgccaacggtgacctgaaaggggccagcaagttgataaccggaagcctggaataccagtacaacgtgaccggaaaatggtggggcgcggtgtttgtcgatagtggcgaagcggtaagcgatattcgccgcagcgactttaaaaccggtaccggggtcggcgtgcgctgggaaagcccggtcgggccaatcaaactcgattttgccgtaccggtcgcggataaagacgaacacgggttacagttttacatcggtctggggccagaattatgagtttatggaaaaaaatcagcctcggcgtggttatcgttatcttactgttgctgggaagcgtggcgtttctggtgggcaccaccagcggcctgcatctggtatttaaagcggcggatcgctgggtgccaggactggatattggcaaggtcaccggcggctggcgcgatctcaccttgtctgacgttcgttatgagcagccaggcgtggcggtaaaagcgggcaatctgcatctggctgtcgggcttgagtgcctgtggaacagcagtgtttgtattaatgatctggcgctgaaagacattcaggtcaacatcgacagtaaaaaaatgcctccttctgaacaggttgaagaagaggaagatagcggtccgctggatctctccacgccgtatcccatcaccctgacacgggtggcactggacaacgtcaacattaagattgatgacaccacggtaagcgtgatggacttcacctccggcctgaactggcaggagaaaaccctgaccctgaaaccgacgagcctgaaaggcctgctgattgctctgccgaaagtggcggaagtggcgcaggaagaagtggtcgaaccgaaaattgaaaatccgcagccggatgaaaagccgctcggcgaaacgctgaaagatctcttttctcgcccggtattgccggaaatgaccgacgtgcatttgccgcttaacctgaacattgaagagtttaagggcgagcagctgcgcgtgacgggcgacacggacatcaccgtgagcaccatgctgctgaaagtgagcagcattgacggcaatactaaactggacgccctggatatcgattccagtcaagggatcgtcaacgccagcggcacggcgcagctgagtgacaactggccggtggacatcactctcaacagtacactgaacgtggagccgttgaaaggtgaaaaagtgaagctgaaaatgggcggcgcgctgcgcgaacagctggagattggcgttaatctttccggtccggtggatatggatttacgcgcccagacgcgactggcggaagccggattgccgctcaacgtggaagtgaacagcaaacagctttactggccgttcactggtgagaagcagtatcaggcggatgatctgaaactgaaacttaccggcaaaatgaccgattacacgctctctatgcgtacggcagtgaagggacaggagatcccgcccgcgactattaccctcgacgccaaaggtaatgaacagcaggtcaatctcgacaaactcaccgtcgcggcgctggaagggaaaactgaactcaaggcgttgctcgactggcaacaggccattagttggcgcggtgagctaacgcttaacggcattaacaccgccaaagagttcccggactggccgagcaaactcaatggcttgattaaaacccgcggtagcctgtacggcggcacctggcagatggacgtgccggagttgaagctgaccggtaacgttaaacagaacaaagtgaacgttgacggcacgctgaaaggcaacagttatatgcagtggatgatcccagggcttcatctggaactcgggccaaacagtgccgaagtgaaaggcgagctgggggtaaaagatctcaatcttgatgccaccatcaacgcgccggggctggataacgcgctgccggggcttggcggtacagcgaaagggctggtgaaagtacgcggcacggtggaagcgccacaactactggcagatatcaccgcgcgcggcctgcgctggcaggaactttccgtggcgcaggttcgcgtggaaggcgatatcaaatccaccgatcagatcgccgggaaactcgacgtacgcgttgagcaaattagccagccggatgtaaatatcaacctcgtcaccctgaatgccaaaggcagcgaaaagcagcacgagctacagttgcggattcagggggagcctgtctccgggcagcttaatctggcaggaagttttgatcgcaaagaagaacgctggaagggaactcttagcaatacccgcttccagacgccggttggcccgtggagcctgacccgcgatattgcgctggattaccgcaataaggagcaaaaaatcagcatcgggccacactgctggcttaacccgaatgcggaactgtgcgtgccgcaaactatcgatgcgggggccgaagggcgtgcggtggtgaatctcaaccgcttcgacctcgccatgctgaaaccgtttatgccagaaaccactcaggccagcggtatcttcacgggtaaagcggacgttgcctgggacaccacgaaagaggggctgccgcagggcagtatcacccttagcgggcgtaacgtgcaggtaacgcaaaccgtcaacgatgcggcgctgcccgtggcgtttcagacactgaatctgacggcggaattgcgtaacaaccgtgccgaattgggctggaccatccgcctgaccaataacggccagtttgatggacaggtgcaggtgaccgatccgcaaggccgccgtaatcttggtggcaacgtcaatatccgtaacttcaaccttgcgatgataaaccccatctttacccgtggggaaaaagcagcggggatggtgagtgccaacttgcgtctgggtggtgatgtgcaaagcccgcagttgtttggtcagcttcaggttacgggtgtggatatcgatggcaactttatgccgtttgatatgcaaccgagccagcttgcggtcaactttaacggtatgcgcagcacgcttgccggtacagtacggacccagcagggtgaaatctacctgaacggtgatgccgactggagccaaattgaaaactggcgggcgcgggtaacggcgaaaggcagtaaagtgcggatcaccgtgccgccgatggtacgaatggatgtaagcccagatgttgtattcgaggctacaccaaacctgtttaccctcgatggtcgcgtggatgtcccttgggcgcgcatcgtggtgcacgatctgccggaaagcgcagtaggcgtctccagcgatgtggtgatgcttaacgataacctgcaaccggaagagccgaaaacggcgagcattccgattaacagtaacctgattgtccacgttggcaacaatgtgcgcattgacgcctttggcctgaaagcgcggctgacgggcgatctcaatgtcgttcaggacaaacaagggctgggtctgaacgggcagatcaacatccctgaagggcgcttccatgcctatggtcaggatctgattgtgcgtaaaggtgagttactgttctctggtccgccagatcaaccgtatcttaatattgaagctattcgtaacccggatgctacagaagacgacgtaatcgccggagttcgcgtcactggtctggcggacgaaccgaaagcggagatcttctctgacccggcgatgagccaacaagctgccttgtcttatttgctacgtggacaagggctggagagcgatcagagcgacagtgcggcaatgaccagcatgctgattggtttgggggttgcgcaaagtggccagattgtgggtaaaatcggcgagacgtttggcgtaagcaatttagcgctcgacacccagggagtaggcgactcctcccaggtagtggtcagcggctatgtattgccaggtctgcaagtgaaatacggcgtgggtatatttgactctatagcaacactcacgttacgttatcgcctgatgcctaagctatatctggaagccgtgtctggtgtagaccaggcactggatttgctctatcagttcgagttttaacaatgcgaatatttgtctacggcagtttacgccacaaacaaggcaacagtcactggatgaccaatgcccagttactgggcgatttcagtatcgataactaccagttgtatagcctgggccactatccaggcgcagttccggggaacggaacggtacacggtgaagtttatcgtattgacaacgccacgctggccgaacttgatgccttgcgcaccaggggcggtgaatacgcgcgccagttgattcagacgccgtacgggagtgcatggatgtacgtttatcaacgacccgtcgatggattaaagctaattgaaagcggcgactggttagacagggataagtaaccatatgcatacgccaccttcgggtggcgttgttttttgcgagacgactcgcattctgttttgtaattccctcaccttttgcttttctctccgagccgctttccatatctattaacgcataaaaaactctgctggcattcacaaatgcgcaggggtaaaacgtttcctgtagcaccgtgagttatactttgtataacttaaggaggtgcagatgcgtattaccataaaaagatgggggaacagtgcaggtatggtcattcccaatatcgtaatgaaagaacttaacttacagccggggcagagcgtggaggcgcaagtgagcaacaatcaactgattctgacacccatctccaggcgctacagccttgatgaactgctggcacagtgtgacatgaacgccgcggaacttagcgagcaggatgtctggggtaaatccacccctgcgggtgacgaaatatggtaaagaaaagtgaatttgaacggggagacattgtgctggttggctttgatccagcaagcggccatgaacagcaaggtgctggtcgacctgcgcttgtgctctccgttcaagcctttaatcaactgggaatgacgctggtggcccccattacgcagggcggaaattttgcccgttatgccggatttagcgttcctttacattgcgaagaaggcgatgtgcacggcgtggtgctggtgaatcaggtgcggatgatggatctacacgcccggctggcaaagcgtattggtctggctgcggatgaggtggtggaagaggcgttattacgcttgcaggcggtggtggaataaggtgtgtttatttatcgcgggcataaaaaaacccttactaaccgaagcccggcgttcagggttattacgccagaagaacttatttattctttgcgcgctcgaaggaggcaacgatttcagctttagcggcttctgcgttttcccaaccttcaactttcacccacttgcctttttcgaggtctttgtagtgctcgaagaagtgagcgatttgcgctttcagcagttcaggcagatcgttaacgtctttaatgtgatcgtattctttgctcagcttgctgtgcggaaccgcaaccagtttcgcatcttcaccggcttcgtcggtcattttcagaacgccaaccggacggcaacggatcacagaacccggctgcagcgggtacggagttgggaccagtacgtcaaccgggtcaccgtccagagacagggtgtggttgatgtaaccgtagttgcatggatagaacatcgcggtggacatgaagcggtcaacgaacagtgcgccgctctctttgtcgatttcgtatttgatcggatctgcgttagccgggatctcaataacaacgtagatgtcttccggcagatctttacccgcagggacgttgagtaagctcatgtctgtttcctttaaaaatatgtggcaaacaagtgccgagtattatagccaactcgcgccgaatgtcttcgcttgttttcgtcttcattttcctttttcaccagttttaagacggtatacagagcaggaaaatccataaccgtagccgcatttttcatagtgagatgaaagcgattacaaacttgtgattaacgttttatttacttttttgaagtgtgatgtaacgcaatctgttacataacgaattgtctatagttttttcgcgaacatcttttaaccaataataactaccccgacgaggacaaccctatgtggaaacgcttacttatagtctctgcagtcagcgcagccatgagctctatggcgttggccgctccattaaccgttggatttagccaggtcggaagcgaaagtggctggcgtgccgcagaaaccaatgtggcgaaaagtgaagccgaaaagcgcggaatcacgttgaaaattgccgatggtcagcaaaagcaggaaaaccagattaaagcggtacgttccttcgttgcacaaggggtggatgcgatctttatcgctccggtggtcgcgacaggttgggaaccggtattaaaagaggcgaaagatgccgaaatcccggtattcttgctcgatcgttccattgatgtgaaagacaaatctctctatatgaccaccgtcactgccgacaacatcctcgaaggcaagttgattggtgactggctggtaaaagaagtgaatggcaaaccatgcaacgtggtggagctgcagggcaccgttggggccagcgtcgccattgaccgtaagaaaggctttgccgaagccattaagaatgcgccaaatatcaaaatcatccgcagccagagtggtgacttcacccgcagtaaaggcaaagaagtcatggagagctttatcaaagcggaaaacaacggcaaaaacatctgcatggtttacgcccataacgacgacatggtgattggtgcaattcaggcaattaaagaagcgggcctgaaaccgggcaaagatatcctcacgggttccattgacggtgtaccggacatctacaaagcgatgatggatggcgaagcgaacgccagtgttgaactgacgccgaatatggcaggtcccgccttcgacgcgctggagaaatacaaaaaagacggcaccatgcctgaaaagctgacgttaaccaaatccaccctttacctgcctgataccgcaaaagaagaattagagaagaagaaaaatatggggtattgagggttgctatgcctgatgccgattcgtaggccggataaggcgctcgcgccgcatccggcgatggtgcactgaagcctgatgcgacgcttaccgcgtcttatcatgcctactgggagcacgctttacaccgggggaaaccatgacgaccgaccaacaccaggagatcctccgcaccgaaggattaagtaaatttttccccggcgtcaaagcgttagacaacgttgatttcagcctgcgccgtggcgaaatcatggcgctgctcggtgaaaacggggcgggaaaaagtacgctaatcaaagcattaactggtgtataccacgccgatcgcggcaccatctggctggaaggccaggctatcagtccgaaaaataccgcccacgcgcaacaactcggcattggcaccgtctatcaggaagtcaacctgctacccaatatgagcgtcgctgataatctatttataggccgcgaacccaaacgcttcggccttctacgccgcaaagagatggaaaagcgcgccaccgaactgatggcatcttacggtttctccctcgacgtgcgcgaaccgctcaaccgctttagtgtcgcgatgcagcaaatcgtcgctatttgtcgggctatcgatctctctgccaaagtgctgatcctcgatgaacccaccgccagtctcgacacccaggaagtggagttactgtttgacctgatgcgtcagttgcgcgatcgcggcgtcagcctgatttttgtcactcactttctcgatcaggtctatcaggtcagcgatcggatcaccgtcttacgcaacggcagtttcgtaggctgtcgggaaacgtgcgagctaccgcagatcgaactggtaaaaatgatgctggggcgcgagctggatacccacgcgctacagcgtgccgggcgaacattgttgagcgacaaacccgttgccgcgttcaaaaattacggcaaaaaaggaacgatcgcaccgtttgatctcgaagtacgccccggcgagatcgtcggtctggctggattgctgggaagtggacgtaccgaaaccgccgaagtgatcttcggtatcaaacctgctgacagcggcacggcgttgatcaaaggcaaaccgcaaaacctgcgaagcccacatcaggctagcgtactgggcattggcttctgcccggaagacaggaaaaccgatggcatcatcgctgccgccagcgtgcgggaaaatatcatcctcgctctccaggcccagcgcggctggctacgtcccatttcccgcaaagaacagcaagagattgccgaacgctttatccgccagcttggcattcgcacacctagtactgaacaaccgattgaatttctctccggcggcaatcagcaaaaagtgttgcttagtcgttggctactgacccgaccgcaatttctgatcctcgatgagccaacccgcggcattgatgttggtgcccacgccgagatcatccgcctgattgaaacgctatgcgccgatggtctggcgctgctggtgatctcctccgaactggaagagctggtgggctatgccgatcgggtgattatcatgcgcgatcgcaaacaggtggcggagatcccgctggcagagctttccgttccggcgatcatgaacgccattgcggcgtaaggagaacagtgtgatgcctcaatctcttccggacaccactacgccaaaaaggcgctttcgctggccgacggggatgccgcagctggtagcactgttgctggtgctgctggtcgatagcctggtagccccgcatttctggcaggtggtgcttcaggatgggcgtttgttcggtagccccatagacattcttaaccgtgcagctcccgttgcgttactggcgattggcatgacgctggtgatcgccaccggtgggattgatctctccgtaggggcggtgatggctatcgccggagccacaacggctgcgatgacggtcgcgggattcagcctgccgattgttttgttaagcgccctgggcaccggcatcctggcgggattgtggaacggcatactggtagcgatcctcaaaattcagccgtttgtcgccactctgatcctgatggtcgccgggcgcggcgtggcgcaactgatcaccgccgggcagatcgtcacgtttaacagcccggatctcagttggttcggcagtggaagcctgttgttcctgccaacgccggtcattatcgcggtgctgacgcttatcctgttctggctgttgacccgcaaaacggcgctggggatgtttatcgaagccgttggtatcaacattcgggcggcaaaaaatgccggggtaaacacgcgaatcatcgtcatgctcacttatgtgttgagcgggctgtgtgcggcgattgcgggcattatcgtggcggcggatattcgcggtgccgatgccaacaacgctgggttatggctggagctggacgccattctcgcggtggtgattggcggcggaagcctgatgggcgggcgctttaacctgctacttagcgtggtgggggcgctgattattcaggggatgaacaccggaattttgcttagcggctttccgccagagatgaaccaggtggtgaaagcggtggtggtgctttgcgtgctgattgttcagagccaacgctttatcagtctgattaaaggagtacgtagccgtgataaaacgtaatttgccactgatgatcaccatcggcgtctttgtgttgggttatctttactgcctgacccagtttcccggttttgcttccacaagagtgatctgcaatatcctgaccgataatgcctttcttgggatcattgccgttggcatgacctttgtgatcctcagtggtgggatcgatctctccgtcggtagcgtgatcgcctttactggcgtgtttctggcaaaagtgattggcgatttcggcctcagcccgctgctggcgtttccgctagtgctggtgatgggctgtgccttcggcgcatttatggggcttctgatcgacgccctgaagatcccggcatttatcattacgcttgcggggatgttctttttgcgcggcgtcagctatctcgttagcgaagagagcattccgataaaccatcccatttatgacacgctcagtagccttgcgtggaaaatccctggcggcggtcgcttaagtgcgatgggactgctgatgttggcggtggtggttatcggcatattcctcgcgcatcgtacccgttttggtaatcaggtatacgccattggcggcaacgcaacgagcgcgaatctgatggggatttccactcgcagcaccactattcgcatttatatgctctccaccggactggcaacgctggcggggattgtcttcagcatttatacccaggccggatatgcgctggcgggcgtaggtgtggaactggatgctatcgccagtgtggtaattggcggtacgcttttgagcggtggcgttggaacggtattagggacgctttttggcgtggcgattcagggactgattcagacttacataaactttgatggcacgctgagttcctggtggacgaaaatcgccatcggtattttgttgtttatttttatagcattacagcgtggattaacggtgctgtgggagaatcgtcagagtagcccagtgacaagagtcaacattgcgcagcaataaaaacgcctctccgtgtggagaggcgcaggagattacgcgtccgggaactcacggataaagcgttcgacatcttcaaccatatggtcgttgccgacaaagaaactacggcgctggtgcagggtttccgggatgatatccagaatacgctctttgccatcgctcgctttaccgcccgcttgttccgccaggaatgccatcgggttgcactcatacagcaaacgcagtttgccgtccgggtggctggcggtgcttgggtagagataaataccgcctttcagcaggttacggtggaaatccgcgaccagactaccgatataacgactggtataagggcggttggtggatttatcttcttcctggcagaatttaatgtacttcttcaccccgttcggaaacttaatgtagtttccttcgttgatggagtaggttttgcctttctccgggaagcgcatccgttcctggcacaggcagaaaacgccgaggctaggatcgtaagtaaaggcgtgaacaccgcatccggtggtgtaaaccagcatggtagaggagccgtataccacgtaacctgccgcaacctgtttgttaccaggctggaggaaatcttcttccgttaccggcgtgccaacaggcgtaacgcggcggtagatggagaaaatggtaccgacagagacgttaacatcgatgttggagctgccatccagggggtccatcagcaccacgtattttgcgtgttcacagccttcaaagacgacaatctcatcttcttcttcagaggcaatgcccgcaacgatatcgcgtgctttcagtgcggctttcagtttttcattagcgaacaagtcgagtttctgctgaacctcgccctgcacgttctcagcaccgctggcacccaggatatcaaccagtcctgctttgttgatatcgcgatggataatcttggcgcccagttttattgcgctcagcaaagcagtgagctcaccggtagcatgagaaaactcgtgctgcttttcgacaataaattcacctaacgttttcataaaactttccctgcaatgtttatggagtaaagcgaccgcaacaatcttaacaaataatctcaatgttgcgctcaggtgaatcgcgccagcaaattacggattatcctgaaatgcgtttctcacttgcccgacatatgcgtaaaatgagcggcagattaaaaaaggatagtgacgtatgcgcattcatattttaggaatttgtggcacatttatgggcggtctggcgatgctggcgcgccagttaggccatgaagtaacgggtagcgacgccaatgtgtatccgccgatgagcaccttacttgagaagcaaggcattgagctgattcaggggtacgatgccagccagctcgagccgcagccggatctggtgattattggcaacgccatgacccgtggaaatccgtgtgtggaagcggtactggaaaaaaatatcccttatatgagtggtccacagtggctgcacgattttgtgctgcgcgaccgctgggtgctggccgttgccggtacacacggcaaaaccaccaccgcgggaatggcgacctggattctggaacagtgtggttacaaaccgggctttgtaatcggcggtgtgccggggaactttgaggttagcgctcatctgggcgaaagcgacttctttgttatcgaagcggatgagtatgactgcgccttcttcgacaaacgctctaaatttgttcattactgcccgcgtacgctgatcctcaacaaccttgagttcgatcacgccgatatctttgacgacctgaaagcgatccagaaacagttccaccatctggtgcgtatcgttccggggcagggccgtattatctggccggaaaatgacatcaacctgaaacagaccatggcgatgggctgctggagcgagcaggagctggtgggtgagcagggtcactggcaggcgaaaaagctgaccaccgatgcttccgaatgggaagttttgctggatggcgaaaaagtgggcgaagtgaaatggagcctggtaggcgaacataatatgcacaatggcctgatggcgattgcagcggctcgccatgttggtgtagcgccggcagatgccgctaacgcgctgggtagctttattaatgctcgtcgccgtctggagttgcgtggtgaagcgaatggcgtcacggtatatgacgattttgcccatcacccgacggcgattctggcaacgctggcggcgctgcgtggcaaagttggtggtacggcgcgcattattgctgtgctggagccgcgcagcaataccatgaaaatggggatctgcaaagacgatctggcacctagtttaggtcgtgccgatgaagtcttcctgctgcaaccggcgcatattccgtggcaggtggcagaagtggcagaagcctgcgttcagcctgcacactggagtggcgatgtggatacgctggcagatatggtggtgaaaaccgctcagcctggcgaccatattctggtgatgagcaacggcggttttggtgggatccatcagaaactgctggatgggctggcgaagaaggcggaagccgcgcagtaattcggccttagccagatatagtatgcgtaggccggataaggcgttcacgccgcatccggcatttgagcatagtgcctgatgcgacgcttgatgcgtcttatcaggcctacaggtgcaccgtatccggcaaaccatactcacatcaacaacgaaaattacccttcgttctccgctaactcgcgcagatactggaaaatctggcgtgcggatttcggcggcttattcccttctttctctttcttcgcgttgcggatcagagtacgcagttgctgacgatcggcatcgggccacagatttaatacctcagcgatggcgtcatcaccttgatcgatcagacgatcgcgcaggttttccagtttatggaacagcaccacctgctggttgtgacggtttttcagcttatccagcgcctgacgaataggctctacgtcgcgctggcgcagcatcttaccgatgagctgcaactggcggcggcgaccttccatcttaatacgctgggcgagctcaatagccgcgcgcagatccgcatctaacgggatcttatccagcgcgtttttccccagatcaacaatttccgcgccaaggcgttttagctcctcggcatcacgtttaatttcacttttactgacccagataatttcatcgtcttcgtcttcgatgtcatcaccgggaacgtcgtcgagccagtcttcgggctgcttagtcatctcaggctccttaaaaaaagaggctaatgttaccagttaagatgcgcactgaaaaacggttctctgttagacttcagagaaactctctacattatggcacttgcaatgaaagtaatctctcaagttgaagcgcagcgcaagattctggaagaagcagtttccactgcgctggagttggccagtggcaaaagcgacggtgcggaagttgccgtcagcaagaccaccggcattagcgtaagcacgcgttatggtgaagtggagaatgttgaattcaatagcgatggcgcgctggggatcactgtttatcaccagaaccgcaaaggtagcgcaagttccaccgatttaagcccgcaggccattgcccgtactgtacaggcggcgctggatattgcccgttataccagcccagatccctgtgccggcgtggcagacaaagagctgctggcctttgacgcaccagatctcgacttgttccaccctgcggaagtttccccggatgaagccattgaactggcggcccgcgcagaacaggcggcattgcaggcggacaaacgcatcaccaataccgaaggtggcagctttaacagccactacggtgtcaaagtttttggcaacagccacggcatgttgcagggttactgcagtacgcgtcatagcctctccagctgtgtaattgccgaagaaaatggcgatatggagcgtgattacgcctacaccattggtcgtgcgatgagcgatctgcaaacgccagagtgggttggggccgactgtgctcgccgtactttaagccgtctgagtccgcgtaaactctccaccatgaaagcgccagtcatttttgccaatgaagtggcaaccgggctttttgggcatctggtgggggcgatagcgggtggaagcgtttatcgtaaatctaccttcctgctggatagcctgggtaaacaaattctgccggactggctgaccattgaagagcatccgcatctgctgaaagggctggcgagcacgccattcgacagcgaaggtgtgcgcaccgagcgtcgcgatattattaaagatggcatcctgactcagtggctgctgaccagctacagcgcgcggaaactggggctgaaaagcaccggacatgcgggcggtattcacaactggcggattgccggacaaggtctaagcttcgagcagatgctcaaagagatgggcaccgggctggtggtgacggaattgatgggccagggcgtgagtgccattaccggtgattattcccgtggtgcagcgggcttctgggtagagaatggcgaaattcagtatccggtgagcgaaatcaccatcgcaggtaatttaaaagatatgtggcgcaatattgtcaccgtcggtaacgatattgaaacacgcagtaatatacagtgtggttctgtgctgttgccggagatgaaaatcgccggacagtaaaaaaactggcgcgacctgccgcgctataaactaaaaaattacacaaaatcattcgcactgcatcgagacggaaagtgaatgagggccggggagcgtactcgcagtacgtgacccggtcgaatgagcgtagtcgtcgatgaggcagtgtgaaggatgaagtgtaaataaaaaaggaactattcttgcagtctcctcgttggtattcagttcggcgtcatttgctgctgatctcgaagacaatatggaaaccctcaacgacaatttaaaagtggtcgaaaaagccgataacgcggcgcaagtcaaagacgcgttaacgaagatgcgcgccgcagcgctggatgcgcaaaaagcaacgccgccgaagctcgaagataaaagtccggacagcccggaaatgaaagatttccgccacggtttcgacattctggtcggtcagattgacgacgcgctgaagctggcaaatgaaggtaaagtaaaagaagcgcaggctgctgcagagcaactgaaaacgacccgcaatagttatcacaagaagtatcgttaattcctcatttccctgttgcctgcactcaggtaacagggaacttatcatcgcaaatgatgcaccacctgattgctgctgccgcgccagatcagggaagggtcttttaaatcctgcacaaatttgccgtcgaccagcacgttaatcaaatcaacaacctgcatttgcgcagcgttgagttcgtcgagtttatagcctgtccacacccagatgtctttacccggacactcggcgcggatgcgttgtaccagtttcagaatatccggcacgttttgcggatgcagcggatcgccgccggagagggaaataccctggcgtttgatacgagtgtcattcagatcgttaatgatctggtcttccattgctttggtaaatggctgaccggaatttacccgccatgtgcttttgttatagcaaccggggcattcatgaacacacccggagacaaacagggtgcaacgagtgccggggccgttgacgatgtcgacaggatagtactgatgataattcattatttcgcctggcttatcagtccgcgtgtaggctgcatccggtaatcaatgcctgatgcgacgctgtcgcgtcttatcagacctggagcaattgccaaatgtaggccggataaggcgtttacgccgcatccggcatttgcttagctcagagtgaagattaacctatctgcccattccccaaatgtttaacgcggcgcttaacttcttcctgcttaccagcgttaaacggacgtgcatccgggctacctaaatatccgcacacgcggcgagttacgctcacacgggaggcgtcatggttaccacatttcgggcaagtgaagcctttgctggtgcactcgaactcaccggtaaagccacactcgtagcactcatcaatcggtgtattggtgccgtaatacggtacatgctgatagctgtaatcccagacatcttccagcgccttcaggttgtgctgaatgtttggatactcgccgtagcaaatgaaaccaccgttcgccagcggcgggtaaggcgcttcaaagtcgatcttgtcgtacgggttcaccttcttctccacatcgaggtggaaactgttggtgtagtaacctttatcggtcacgcccggcaccacgccaaactcagcagtatcgagacggcagaagcgatcgcacaggttttcactcggcgtgctgtagagactgaaaccataacccgtttcttctttccactgatccactgcctgacgcagacgttcaacaatggcgatacctttcgcgcgaagctgctcgttgtcgtaaacatgctcgccgccgaacagcgcgttaatggtttcgtggatgccgatgtaacccaggctaatagacgcacgaccgtttttgaagatttcagaaacatcatcgtcagcattgagacgcacgccacaagcaccttccatatagaggatcggggccacgcgcgctttcacgccttcgagacgagcgatacgggtcatcagcgccttacgtgccagcaccagacgttcatccagcagcttccagaaggtggcttcatcgccttttgcttccagagcaatacgcggcaggttcaggctgatcacgccgaggttgttacgaccatcgtggatctgctcgccgttttcattttcccacacgccgaggaagctgcggcagcccatcggagttttaaagctaccggtgactttcactacctgatcgtagttcaggatatccggatacatgcgcttgcttgcgcactccagcgccagctgtttgatgtcgtagttcggatcgccttttttatggttcaggccatcgcgaatcgcaaacaccagtttcgggaacaccgcagttttacggtttttaccgaggcctgcgatacggttacgcaggatgctttcctgaatcaggcggctttcccagctggtgcccaggccaaaaccaaaggttacaaacggcgtctgaccgttggcggtgtgcagggtgtttacttcgtactccagactctggaaggcatcgtagcactctttgatggttcgagagttagcgtagccttcggcgtccgggatgttccactcttctgcggtcttgcgatgtttgttgtagctggcagtgacaaacggtgccagcacttcatcgatacggttaatggtggtgccgccataaatatggctggcaacctgagcaataatctgcgcagttaccgcggttgccgtagagatgctcttcggcggttcaatctcggcgttccccattttaaagccctgggtcagcatgcctttcaggtcgatcaacatgcagttgaacatcgggaagaacggactgtaatcgagatcgtgatagtgaatatcgccacgctcatgtgcctgcaccacgtcacgcggcagcaggtgctgacgtgcatagtgtttagccacgatcccggccagcaggtcgcgctgggttggaatcaccttgctgtctttgttggcgttttcgttgagtaagctggcgttggtctgctcgaccagaccacggatctcctggttcaggcgaccgcgtttttcacgttcaatgtcgcgatcgtgacggtactcgatgtaagcacgagccagttgtttgtatggaccactcatcagctgattttcaactgcggtctggatctcattgatatccacctggttgcggccctgcatctgctcgctgacaaccgcggcaacagtggcgcaataatcggcatcatcgacttccgctgctttagctgcacgcagaatcgcttctttgatgcgctcacttttaaacggcactttgcagccgtctcgtttcatcacatgcggtgtcatgatcgctccatatttttaagaacaggttatccacagaaattgggaaaggcgttttccggttttttcgtttcgttttccggtgctttccgcaatcgccatccgcttatccacaacgccgcacctttttcgtggggagctgtagtagcaattatagtcgattaatacaacatattgggttgggacgcattttaaagtctatatatagtgctttgcatcaaggatgtttgagctttttttgatgtagctcaaagtaaaaagcagagcgtacggatgacgggcgctacagcgatatgtaaattttttaatgaatttgctggttgaaaaatcaacaaaaacaacatactgacagacaaaaccccggaatgaccggcattaccggggcttagggaagatttacttctgtaaccaccagacagcctcaaaaggccgtaaattcatggcacagggttgtggactggcttcttcgtagttatgcatcacaagctgccagttgccgcgcatttgccctgcctgccagggttggatctcacggctaaggttggcaatgaccagcaaggtttgccccttccattcacggcgatagcaccacaatacagggctgtttggcagcagatcctggtaattgccccatgtcaggatggcttcctgcttacgcagtgcgattaacttttggtaggtgtaaaacacgctggaatcatcggccagcgcggcttctacgttgatttgttgatagttatcgcccaggccaatccacggttcgccagccgtaaacccggcattatcgccgttgctccattgcatgggcgtgcgactgttgtcacgggatttactggcgaggattgccaataactcgtcggcatcacgcccatcgttgcgcagctcggcaaacatattgaggctctctacgtcgcgatagtcagtaatgcgcgtgaaatgcgggttggtcatgccaatctcttcgccctggtagatatacggcgttccctgcatgccatgcagcaccatcgccagcatttttgccgcaggcacgcggtattcaccttcatcaccaaagcgagaaacaatgcgcggctgatcgtggttacaccagaacaaggcattccatgctacgttgtgcattccttgttgccagtggcggaacaatgttttcaacgccacaaagtcaggtttagccagcgtccatttttcaccaccgggataatcgaccttcaggtgatgaaaattaaaggtcatgctcaattcactgcctgtcagagccgcgtatcgctggcaatgctcaaggctggtggaggacatttcacctacggtcattaacccgcgtggcgtaaacacatcgcggttcatctcgtgcaaaaactcgtgtgctcgtggcccgtcggtgtagaagcgacgcccgtcgccgtccaggtcttcagggaaacgcgggtctttggagatcagattcaccacatccaggcgcaacccgtcgaccccacgatcggcccagaactcacagacttttttcagctctgcgcgtaccgctggattctcccagttgagatccgcctgttctggtgcaaagagatgcaaatagtactgttcgctttccgcatgccagcgccacgcactaccgccaaatttactacgccagttgttcggtggcgtttctggttctccatcgcgccagatataaaactggcggtaagggctttctttgttcagcgcctcgcgaaaccaggcatgttgggtagaggtatggttaaacaccatatcgagaatgatacgaatcccgcggctttttgcctgcgtcaccagttcgtcaaaatcgtccagcgtgccgtaggtgggatcaatcgccgtatagttcgctacgtcgtaaccgttatcgacctggggagagacataaaagggggttagccagatggcatcaacgcccagtttatgcagatagtccaggtgttggataacgccacgtaaatcgccggtaccgctacccgtggtgtcctgaaaactctttggataaatctggtagataacgccgttttgccaccagtggggaagatgagtcattacgttattcctgcgaatgcgagggggcgcaattgcgccccgaagaaaattaaacaatgtccagcgtgcccaggcggtatttccgctgatagataaagctggtgagtacaatcgggatgatgatggcgatagccattgccagcgcaaacacctgccagtagctcggttgaatgctgagaattcccggcaggccgcctacgccgatgccattcgccataacgccgttcaggccgcatagcaatcctgccagaccagaaccaatcatcgcgcacagcatcgggaagcgatatttcaggttgatgccgtacattgcaggctcagtgaccccaagccaggcggagatagcggcaggcacggagatctcgcgttcattgtgcttgcggctggaaatgataatgcctatcacggcggagccctgagcgatattgctcagcgcaatcagcggccacactggcgtaccacccatgctttgaatcatctgcaaatcaatagcaagcgtggtctggtgtacaccggtgatcaccagcggggcgtacaggaagccaaacaatgctgcgccaatcggagcaaagctgccggtcatcaggtgacgtaccgcaaaggcaacgccatcgccaatcatgcgaccaaacggaccaatcagcgcatgggcgaggaacaccgcgaggatcaggctacagacgggtaccaccaccagatagaggtaatccggcacgatgcgtttaaggcgagtttcaataacgcccagcgccagtccggctaacagtgccgggatcacctgcgcctgatagcctactttggcgatgctgaacatgccaaagtcccacacttccggcagctgctgcccgagcagataagcgttcatcagctgtggagaaaccagtgtcacgccaagcacgataccaaggatcggcgtgccgcccatttttttcaccgcactccagcaaataccgaccggcaggtagaagaagatcgcttcaccgatcaaccacagaaaatcgtagatcgtttgcagggaagggtacatttgcgccagcgtctgaccgttgctcatgggcaaatcgccgatcacattgcgaaaaccgaggatcaaaccgccgctaatcaacgcgggcagcaacgggaagaagatcaccgcgaaatgagagatcaactgctcatgccatttcatattatgccgggcggctttttttacctgctctttatcaacctgcgcctgtccggtactcgcaatcagtgcttgatagtaatcacccacgttggtgccaatcaccacctgaaattgcccggcattggtgaaacagcctttcaccatagggagttgctcaatttctttcggtctggcattggccggttggttgaggacaaagcgtaggcgagtaatacagtggctcaccgtcgcaatattgccgcgcccgccgaccagttcaatcaaccgatcgatatccgtttggtttattttgctcatcataaagccccatggcagatgacatttttggttggctgcagaatatattgcgcggaaaaatttaaaaacgggaacgttcccgaaacgcagcgaagatcacaatttatcgttcaggaaacgatcaggacagggtggcggggatgatgatttgttgcggttcgctgcgcccggttacctgcgcgatcaactggcaagccgcctggcgtccagcttcggcgtaaccgggatctacggttacgatctccggatggaggaatttcattaacggcgtattaccgacgctcgccagttgcaaggtgtcgatgcgttgctcttgcaggtatttacttgcgccaagtgccagcgtgtcggttgcgcacagtaaggcggtagtttcaggcgtaatcacttttgcaacgttctcatagccttgcttcatagcaagccctggcagggcggcaacgggatgcagtttatgcgctttgcagaacgccaggtaggcttcgtgacgtcgcttaccggttgtcacgtcactgtgcggcacgccgagataactgatattacgatgcccctggtcatacagccgttgcatcaggattttgattgccccttcgtcgtcataacagacgctagcaaagccttttgcgtcacgcgccagcagaaccaggctactctgccagtgggctaacatttcttctgttatgccagtaaaaccgaacagcactacgccgtcgatattacgccgtttcagcactcccaaatgttcggcaactaattgcggggaaaactgactttccatcatgattgggtcgtaaccttgttcatagaacgctggcagcatggtttgaacggcgagattttcactcaagctatccagacgggtaacaatgatggcgaccactttatcgctttgcccacgcatagcgcgcgcagagcgggaaggggaaaatccatgctgattcatcactgcttcaacacgctcgcgggtgagctggctcacgccgctttcgttattcagcacccgggaaactgtagatttccccacgccgcttaagcgcgcgatatctttgatggtcagccgattttgcatcctgttgtcctgtaacgtgttgtttaattatttgagcctaacgttacccgtgcattcagcaatgggtaaagtctggtttatcgttggtttagttgtcagcaggtattatatcgccatagatgctacgaatattattggattctccttattatttgcggcgcttttttcacttaccggaggttatatggaacctgatcccacgcctctccctcgacggagattaaaacttttccggtaagcccgtcttttcacggcgttaccggatgcgtaaggccgtgacgttttaacgtccctgctcagctttattaccttcaggtaaggcttcgccacgcctgaagacatttctgtactgtttcagacagtgcggagggactccttatgtttaaagaaatttttacccggctcattcgccatttaccttcccgtctggttcatcgtgatccattgcctggcgcgcagcagacagtgaatacggtggtcccgccgtccttaagtgcgcattgcctgaaaatggcggtgatgcccgaagaagaattgtggaaaacgttcgacacccatccggaagggttaaatcaggcggaagtggaatctgcccgcgaacaacatggtgaaaataaattacccgcacaacaaccgagcccgtggtgggtacatttatgggtctgctatcgcaacccctttaatattttactcaccattctcggcgctatttcttacgccacggaagatttatttgctgcgggcgttatcgcgctaatggtcgctatttctacgttgctgaactttattcaggaagcacgttccactaaagcggcagatgccctgaaagcgatggtcagcaatactgcgacggtgctgcgcgtaattaacgacaaaggcgaaaatggctggctggagatcccgatcgaccagctggtgcccggcgatattataaaactggcggcgggagatatgatcccggcagatttacgtatcttgcaggcgcgggatctgttcgtcgctcaggcgagcttaaccggtgagtctctgcccgtagaaaaagccgctaccactcgccagccggagcacagcaatccgctggagtgcgacacgctgtgttttatgggcaccaccgtggtgagcggcacggcacaagcaatggtgattgctacaggtgccaatacctggtttggtcaactggcggggcgtgttagtgagcaggaaagcgagccgaatgcctttcagcaagggatcagccgcgtcagtatgctgctgattcgctttatgctggtgatggcaccggtggtgctgttaatcaatggttacaccaaaggcgactggtgggaagcggcgctgtttgcgcttagcgtcgcggtaggcctaacgccggaaatgttgccgatgattgttaccagcacgctggcgcgcggcgcagtaaagctgagcaaacagaaagtgatcgtcaaacatctggatgctattcagaactttggcgcaatggatattctgtgcactgataaaaccggcaccctgacgcaggataaaattgtgctggagaatcataccgatatctccggtaaaaccagcgaacgcgtgctgcatagcgcgtggttgaacagtcattatcagaccggacttaaaaacctgctcgatacagcggtgctcgaaggtacggatgaagagagtgcgcgcagcctggccagtcgttggcaaaaaattgatgagattccgtttgatttcgagcgtcgccggatgagcgtggtagtggcagaaaataccgagcaccatcagctggtttgcaaaggtgcattgcaggaaatcctcaatgtgtgtagccaggtgcgtcacaatggcgagattgtgccgctcgatgacatcatgctgcgtaagattaagcgggttactgatacgctgaatcgtcaggggctgcgcgtggttgcggtggcgacgaaatacctgccagcgcgtgaaggagattaccagcgggcggatgaatccgacctgatcctcgaaggatatattgcttttcttgatccgccaaaagagacaaccgctccggcactgaaggcattaaaagcgagtggaattaccgtaaaaatccttactggcgacagtgagttagttgcagcgaaagtgtgccatgaagtggggctggacgcgggagaggtggtcattggtagtgatattgaaacgctatctgacgacgaactggcaaatcttgcacagcgtaccacgctgtttgcccgcctgacgccgatgcataaagaacgcattgtgaccttactgaagcgcgaagggcatgtggttggctttatgggcgatggtattaatgatgcgcccgccttacgcgctgcggatatcggcatttctgtggacggcgcggtagatattgcccgtgaagcggctgatatcatcctgctggaaaaaagcctgatggtgctggaagagggggttattgagggacgtcgcactttcgccaacatgctgaaatacatcaaaatgacggcgagctctaacttcggtaatgtgttcagcgtgctggtagcgagtgctttcttgcccttcctgccgatgttgccgttacacttgcttattcagaacctgctgtacgatgtgagtcaggtggcgatcccgtttgataacgtcgacgacgagcaaattcaaaagccgcagcgttggaatccggcggatctggggcgctttatgatcttcttcggaccgatcagcagcatcttcgatattttgacgttttgcctgatgtggtgggtattccatgccaacacgccggaaacgcaaacgctgttccagagcggatggtttgtggtgggcttactgagccaaacgctgattgtgcatatgatccgcacccgccgtgtgccgtttattcagagctgtgcaagctggccgttaatgatcatgaccgtgatcgtgatgattgtcgggatcgcattgccgtttagtccgctggccagttatctgcaattacaggcgctgccgttaagctatttcccgtggctggttgcgattctggcagggtatatgacattaacccagttggtgaaagggttctatagccgtcgttacggctggcaataaagaataaactgggcacgatagccccgattcagattgtagacaaagtgagttttgttcatgccggatgcggcgtaaatgccttatccggccaacaaattcaataaattgcaggaatcacgtaggcctgataagcgtagcgcatcaggcgattttgcgtttgtcatcagacttaatccgggcatgatagcccggatttccatcaagattagcgacgaacagcgatcgcttcgatctcaatcttcacgtctttcggcagacgggcaacttcaacgcaagaacgtgccgggaaggtggcgttgtgttcggtgaagaaggcttcgtaagtggcgtttacggttgcgaagtcgttcagatcttttacaaacacggtagttttaacgatgtcgcccactttcaggccagcggcttcgacgatcgcttttacgttatccaggctctgacgtgcctgtgcagcgacgtctgccggtacttcgcccgttttcggatttaccgggatctgaccggaggtgatgatcatattgcccagatcaacgccctgtacgtaaggaccgatagctgccggtgcattttccgtcgcgatagttttgctcatgatttctcctttattacagcggtaaaaagtctggctcattatagggagccagacttttattaccaaccgcaattaattggccagcaccacattatgggaaaactctttttcacagtatttgcatttgagcgcgatatcattggcgcgttttcgcacggcaaagctggaactaaccggttcggcatggctgatacagttgctgttcgggcagaccagcacattgtcgatgcgctccggcagacttgggcggcttttacccaccacttcatagttgtcgatacggttaaccgtggcttgcggcgcatacaatgccagttgatctacttgatcttcactcaaaaaggtattttcgattttgatcagatctttgcggcccatctcgccagaaggcaggttcagaccaatggtgatgcgctgatccgtttcggtcagcttgaacagactcaacagcttaaaaccgatctgggcggggatatggtcaattaccgtgccgcgtttaatagcttcaacctgcaatttattatcgtgtgtcatctctatttccccttacagtaccagatcgcgattcagaaccagtgccagtaacgcctggcgagcgaaaatcccgttgcctgcctgctggaagtaccaggcgtgtggcgttttatcaacatccgtcgcaatctcatcaacacgcggcagcggatgcagcactttcatattggctttggcgttgtggagatcgctggcgcgaagaacaaactgcgctttcacgttggcgtactcggacgggtccagacgctctttttgcacgcgggtcatgtacaggatgtctacttccgccatcacttcttcaatagagctgtgcagactccatgcgatccctttttcatcgagcatatccagaatgtattgcggcattgccagcgcgtccggcgcgatgaagtaaaaacggttgccgtcgaacttcgctaacgcctgagtcagggagtgaacggtgcggccatatttcaggtcaccaaccattgcgacgtggagattgtccagacgcccctgggtttcctgaatagtgaataagtccagcaaggtttgcgtcggatgttggttggagccatcaccggcattcagtaccggtacattgccggaaaactcggtggccaggcgcgccgcaccttcctgcggatgacgcatcactatcgcatcgacgtaagtgctgataacgctaatggtatcggccagcgtttcgccctttttacccagacttgtattggcgctgtcggagaagcccaccacgctggcccccaggcggtgcatagatgtttcgaaagagaggcgggtacgggtagaggcttcgaagaaacagctggcaatgactttgtgcttcaacagctctggttgcgggtttgctttcagtttcgccgctgtcgccagcaccagattaaggtcatcgcgactaaggtcgtttatggaaatgatatgtttctgatatagcggattagccatcttttatctcctgacgcctgggcaaaaaaaagcccctcgattgaggggctgggaatgggtgatcaacgggaagaaaaacggcaggccagcgtcttttttcagacgcggtaagacaaaatgtcgaacacactgaaccatacatcctcccggcaaattgtccggcattatactcatcgtcagaagcggcgcaagcatttgatgcaatattttgtcagcgcaaacggtttatttgaattaaaagtcaaggtatatgcatttttatttgatgtgattctgcaggggaactgtccttcggtatcaataattgcagacattccctgctttttcctttttcactttcacgcaatcagatatgcattttattccattcatccgacttatagggcggagtgtgaaagcgaacggctaacactattgcttactgctcagggatgcgcgctatcactttaatttcaaaatcaaagcctgccagccatgtaacacccaccgccgtccagtttggataaggtggggcgctaaatatttcatttttcaccgtcatgatgtcttcaaattggttttctggatcggtatggaagctcgtaacatcaatgatatcgtcaaaagtgcatcccgcagctgccagggtcgcatgcaaattatcaaatgccagtctgacttgttgctgaaaatcgggttctggtgttccgtcctctcgacttcctacttgcccggaaacaaacagcaaatcgccggaacgaatagccgcagaataacgatgctcagcatatagactatgtcggccagcagggaaaacagcggttctttctaccatttggttatcctcaagatttacgacatgaacagaagatttctctttaccgggagccgcttttagcggacgacgtgagtaaacaaaacccagacatcatggataatggctgggcttaattgagcgtagtcggttatgcgccaaacgcgccatcaatggtatgcatcgcgccggtaacaaaactggcttctggccctgctaaccatgcgaccataccagcgacctcttccggttgcccatgtcttttgatagccatcaaactatgcaacatatcgcgcattggcccgttggcgggattagcgtcggtatcaattggccctggctggacgacgttaatggtgatcccacgcggtccaaaatcacgggccagcccgcgcgccatgccttgcagggcagatttgctggcggcataagcagccatgcctgcaacaggcatacgatcgccattcacggagccgatgattaagatgcgcccgccttcgggcatctgccgggcggcttcaacagaggcatgataaggagcatgaatattgattttgaaaaggcgatcaatatcgtcggcatttaattccagggcctcgccaaagacgccaatacctgcatttaccaccaggatatccaatgcgccgctcttacgaacgacatcaatgacagcgtctctgtcagcactatctgtgaatactgctgtcgctccagtctcttgtgccaggcgtttagcggcatctttgctccccgcataggtgaatcgtacattggccccatcggtgacgaaacgacgtacgatagcggcaccgataccacgactgccaccgaggatgagaactgtcttacctgtaaaagcgcccataaggactccttgatttattatgtaacatgcattacaaaactgttttaactttctgtcaacaggttttgtaatggtcactaaaaaacaatctcgcgttccaggtcgtcccagacgtttcgctcctgagcaggcaatctctgcggcaaaagtgctttttcaccaaaaaggtttcgatgctgtcagtgttgctgaagttactgattatcttggtattaaccccccgagcctctacgcggcttttggcagtaaagctgggttatttagccgtgtactcaatgaatacgtcggtacggaagctattccgcttgccgatattcttcgtgatgatcgtccggtaggcgagtgcctggttgaggtattaaaagaagcggcgcgcagatatagccaaaacggcggctgcgctggctgtatggttcttgaaggtattcatagtcatgatccacaagcgcgtgatattgccgttcaatattatcacgccgcagaaacgaccatttatgactacatcgccaggcggcatccacaacgcgcacaatgtgtgactgattttatgagtaccgtgatgtctgggctttctgcgaaggcacgagaggggcactctatagaacaactctgtgcaacagctgcaatggcgggggaagcgataaaaactattcttgaggagtgatgcgggccttgacccgaaaggcgggaaagcgcctgccgataagttgtgataagacaataattcacgcgttaaggctagcggaattgattatcttttcgtataacgatagaaatgaaacgttgttttaattaaggagtggaaaagatgatcatcggaaatattcataatcttcagccgtggctaccccaggagttacgccaggcgattgagcatatcaaagcacacgttacggcagaaacgccaaagggcaagcacgatatcgaaggcaatcgactgttttatcttatcagcgaagatatgaccgagccgtacgaagctcgccgtgcggagtaccatgcccgctatcttgacattcagattgtgttaaaaggtcaggaaggcatgaccttcagcacgcaacctgcaggcgcgccggataccgactggttagctgataaagacatcgcatttttgccggaaggcgttgatgagaaaacagttattctaaatgaaggtgattttgttgtgttttatccgggggaagtgcataaaccgctgtgcgcagtgggcgcgccagcccaggttcgcaaagcagtagtgaagatgctgatggcgtgatgacttttcgccgtaaataactcaaggtttacggcgagtttgtgaaaagagcgttttttgatatttttttgtgagtaaaatttgtaatgcttagacgttcttattcactcaaggagttcgtcatgagcaaaataagtgatttaaattattctcaacacattacattagccgacaattttaaacaaaaaagtgaagttttaaatacctggcgtgttggaatgaatgattttgcccgtattgccggggggcaggataacagaaggaatattctttctcctggagcatttttagagtttttggcaaagatatttaccctgggttatgtggattttagcaaacgctccaacgaagcgggtagaaatatgatggctcatattaagtccagttcttattctaaagatactaatggcaatgaaaaaatgaagttttacatgaataatcctgtaggggaacgagcggatagtcccaaggtgattatagaaattagtctttccactatcactactatggggactcgtcaaggacatacagccattatatttccacaacctgatggtagcactaaccgttatgaagggaagtcctttgaaagaaaagatgagagtagtttacacctgattactaacaaggttctggcgtgttaccaaagtgaagctaacaagaaaatagcgcgtctattaaataataatcaggagttaaataatctacagaaattaaataatctacagaagttaaataatctactgaagttaaataatatacaggggttaaataatcctcaggagttaaataatccgcagaatttaaatgattctcaggagttaaataacagccaggaattaaatagtccacaggagttaaatgatccgcaggagttaaataattctcaggacttaaataactctaaggtgagttgtacagttagtgttgattctacgattacgggtttattaaaagaaccattgaataatgcattattagcaataaggaacgaacatctgctattaatgcctcatgtatgtgatgaaagcattagttacttactgggcgaaaaaggtatacttgaagaaatagataagctctacgcattaaatgatcacggaattgataatgacaaagtaggtaacaatgaaattaatgacatcaaagttaacctgtctcatattcttattgattccttagatgatgcaaaggttaaccttacaccggtcatcgatagcattctggagacttttagtaaatccccatatattaatgatgtaagaatactggattggtgttttaataaaagcatgcaatattttgatgatactaaaaagataaagcatgcatgctccgtaataaatcatattaatcttcgcagcgatcagtctaaaatagctgagacattatttttcaatctcgataaagaaccctataaaaatagccctgaattacaggggttgatttggaataagttggttgtatatgtcaatgaatttaacttaagtaatcgagaaaaaacaaatttaatacaaaggctatttgataatgttgagtctatatttaatgaagtacctgtcagcattttagtgaatgatatttttatgaatgatttctttatgaaaaatcctgagatgattaattggtacttccctcagttacttaagagttatgagggtgaaaagatttattttgataatttaaaatatgatttaaatgataatgataaggaatctaataaagaaattttgaagaatcaaccagataatgttatcaaagaaaaactgaataatgaatacaaacttagatttagaatgatgcaaactatcttgcaaagcagagttaatgtattaccatatattaatgaacagcgtttaaataaactaaatccaccggaaaatttacgtatagcaatagaacactttgggtggaagaatagacctatcactgcataaaataatgtgatgccgggatggtttgtatttcccggcatctttatagcgatagcaattatttactgagcgtcgcgaccatcaccgctttgatagtatgcatacggttttccgcctgatcaaaaacaatgctggcggcagattcgaagacctcatcagtgacttccataccgccatgtaggccaaattcttccgccattttcttgccaagcgtcgtttggtcgtcatgaaacgcgggcaggcagtggaggaatttgacctccgggttaccggtcaactgcatcatcttgctgttcacctgatattcacgcagcaatgcaatccgttccgcccatttctcttttgcttcccccatgctcacccacacatcggtatagataaagtcagcaccttcaactcccttcgcgacatcttcagtcagcgtaatattcccaccattttgctgtgccagggcgcggcattccgtaaccagcgcagcttccggccagcacgcttgtggcgcgaccagacgcaaatccagaccggtaagcgccgcagcttcgagcatgctattgcccatgttgttacgcgcgtcacctgcatagaccagcgtcatttcgttgaacgctttgccgggcaaatgctcctgcatggtgagaagatccgccagcagctgcgtgggatggaactcattggtcaggccattccataccggcacgctagcgtattccgccagtgtttcgacaatctcctgaccatagccgcgatactgaataccgtcatacatgcgaccaagcacgcgggcagtgtctttaatgctctctttatgaccaatctggctgccgcttgggccgagataagtaacgcgagcaccctggtcatatgcggcaacttcgaaagagcatcgggtacgagtgctgtctttttcgaagatgagcgcgatgtttttaccagtgagtttggcttcttctttaccgcttttcttatcggctttcagcttcgcggctaactgcagcaggctgttgagttcagctggcgtgaaatcgagtaatttcaggaaatgcttatgataaaacccggacatagatccctcctgtggctaacgcctcaatgaattaaaattcaatttatatggatgattattcatttgcaagtctaaagcataaatctttgtcacaaaggtggaggcaatgtcagtggtgtgtgacaataagagtatcggcaggacattaagaggaatgagccatggcaaacccggaacaactggaagaacagcgtgaagaaacacgtttgattattgaagaattactggaagatggcagcgatccggacgcgctgtacaccatcgaacaccatctttccgcagacgatctggaaaccctggaaaaagcagcagttgaagcgtttaaactcggttacgaagtgaccgatccagaagagctggaagttgaagatggtgatatcgtgatttgctgcgacatcctcagcgagtgcgcgttgaatgccgatctgatcgatgcccaggttgaacaactgatgacgctggcagagaaatttgacgttgagtacgacggatggggcacttactttgaagatcctaacggcgaagatggcgacgatgaagattttgtcgatgaagacgatgacggagttcgccactaattaagcgtagcgcatcaggcccaggtagttcctgcaacctggtgaatttgtagcccggataaggcattcatgtcacatccggcataaacaaaacgtacgttgttaatgttcgaatgcccgcgagttgaacacgcgggcatttttttagagttcgcgcaacatccgcacttcacaatcgacatggcccgtgcagccaagcgcatagtcgatatgctcaaagcccaaatgctcataaagcgcaatggcttcctttaaaaaagcggtcgtttccagatagcagcgtttgaaacccatctctcgcgcctgctccatcgccattaaggccagtttttttgccagccctttgccgcggatagccggaagaaaatacatcttttgcagttcgcaaatatcgctctcactcccggttaatggcgctatcccaccgccgccgaccacttcaccctcgtactcaacgacccaatatgcatggccaggctgactatatacttgatacagctcgtcaagattcggatcggcgacggtgtagcctttatcagcggtaagaccgtattcggcggatacctgacgaatgacgcgggcgatagcaggattatcctgcagcgtcaggcgacgcattacaggactttgcggcgcaatgttattcatagtttaacccaataaaaataaagtaattatacatttgtttaataccactctcttcttacgtacgcaagcgacttataaagtaataaagtttttgccagcctattactgataagagtattgtaacgtggcagaacattttactgtctgtatatataagttatatcaatggattttttaattcagggaatttttatggctcaagttattaatgaaatggatgttccgtcccatagctttgtttttcatggtacaggtgagaggtattttcttatttgtgtggtgaatgtgttgttaacgattataacgctaggtatctatttaccatgggcattaatgaaatgtaagcgttatctttatgctaatatggaagttaacggacaacgattttcttatggaattaccggtgggaatgtttttgttagttgtcttttttttgtttttttctatttcgcaatcttaatgacagtgagtgcagatatgccgcttgttggttgtgttttgactttgttactgttggttttgcttatatttatggcagcaaaaggactgcgtcatcaggccttaatgaccagtctcaacggcgtaagatttagttttaattgctctatgaaagggttctggtgggtgacctttttcttgccgattttaatggccattgggatggggactgttttctttatcagcacaaagatgctacctgccaatagtagtagtagtgttattatatccatggttctgatggcaatagttggtattgtttccattggtatttttaatggtactttatatagtctggtaatgagttttctctggagtaataccagtttcggtatacatcgtttcaaggtgaaattagatactacgtattgtataaaatatgccattctcgcatttttagctttattgccttttctcgctgttgctggttatattatcttcgatcaaatattaaatgcgtatgatagttctgtatatgcaaatgatgacattgagaatttacagcaatttatggaaatgcaacgtaaaatgataatcgcgcagttaatctattattttgggattgctgttagcacaagttatttaacggtgtctttgcgaaaccattttatgagcaacctgagtctgaatgatgggcgtattcgttttcgcttaactttaacgtaccacggtatgctttatcgcatgtgtgcgttggtggtgatatccgggattacgggcggtctggcttatccactgctgaaaatatggatgattgactggcaggcaaaaaatacgtatttgctgggcgatttggatgaccttcctttaatcaataaagaagaacaaccagataaaggcttcttagccagtattagtcggggagttatgccttctttaccatttctgtaagagataaaaaaggccggagcatgctccggccttcgttttcatcactgtgttttgattacagcgcggcgataacagcctgctgttcaatcagtttcgctttcgcttccgcatagccttccagcttctcacgctctttcgcgatgaccgcttccggtgcgcgggcgacaaagccttcgttcgccagtttgttctcgatacggctgatttcaccttcaatcttcgccacttctttcgccagacgcgccagctcatcttctttgttgatgaggccagccatcgggatcagcagctctgcaccgtcgatgatcttcgtaacggaaaccggacctttgtcatcggcaggcagcacggtgatactttccagacgcgccagggtttgcaggaagccacggttttcatttacgcgacgttctgcatccgcgctgcaaccacgcagcagcagctccagcggtttgcccggcgcgatgttcatttctgcacggatgttacgtaccgcaacgatcgcctgtttcagccattcggtgtcggccagtgcggcttcatcaacctgagatgcatcgtactgcgggaacggctgcagcatgatggtgtcggcagtgataccgcaaagtactttcacacgctgccagatggtttcggtgatgaacggaatgatcggatgcgcgaggcgcagcagaccttccagtacagtcaccagcgtatggcgagtaccgcgcagttctgcttcggtgccaccgttcattaccggcttggtcagctcgagataccagtcacagaactggttccaggtgaactcatacagaatgcctgcggcgatatcgaagcggaagctgtccagcgcttcgcggtacgctttgatggtctggttgaactccgccagaatccagcggtccgccaggctcagcgtcatttcgccgccgttgaagccgcaatcctgaccttctgtgttcatcagcacaaagcggctggcgttccacagcttgttacagaagttacggtaaccttccagacgcttcatatcccagttgatgtcacgaccggtagacgccagcgccgccagggtgaagcgcagcgcgtcagtaccgtgcggctcaataccgttcgggaactgcttctcggtgcgcttacggattttgtccgccagctgcggctgcatcatattgccggtacgtttttccagcagttctggcaggctaataccgtcaaccatatccagtgggtcgataacgttacccttggatttggacatcttctggccttcgtcatcacgaatcaggccggtcatgtaaacggtgtggaacggcacctgcggtttgccattttcatctttgatgaagtgcatggtcatcatgatcatgcgggcaatccagaagaaaatgatgtcgaaaccagataccatcacgctggttgggtggaactgacgcagggcgtcggtattttccggccagccaagggtagagaaggtccacagcgcagaagagaaccaggtatcgagaacgtcttcgtcctgacgcaggacaacatcagcaccgaggttattttctttacgcacttcgtcttcgttgcggccaacataaacgttacccgcttcgtcataccatgccgggatacggtgaccccaccacaactgacgagagatacaccagtcctgaatatcgcgcatccaggagaagtacatgttttcgtactgcttcggtacgaactgaatgtcgccgttctcaaccgcttcaaccgccggtttcgccaggacatcggcacgcacgtaccactggtcggtcagcattggttcgataactacgccgccacggtcgccgtaaggaacggtcaggtcgtgcggtttaatttcttccagcaggccaagcgcgtcaactgcggcaacgactgctttacgtgcagcaaaacgctccagtttctggaactctgcagggatttcgctggaataaacgtcagattcgttacctttggtatcgaacacctgggcgctttcacggatatcgccgtcaaaggtcaggatgttgatcatcggcagggcgtgacgtttacccacttcatagtcgttaaagtcgtgcgccggagtgattttcacgcagccggtgcctttttccatgtcggcgtgttcgtcgccaacgatcggaatacgacggttaaccagcggcagaatgacatatttgccaatcagatctttgtaacgcggatcttccgggttaacggctacgccagtatcgcccagcagggtttctggacgggtagtcgcgaccaccagataatctttaccgtctgcggttttcgcaccgtcagccagcggatagcggatgtgccacatgctacctttgctttcgcggttttcgacttccaggtcagagatagcggtgcgcagtttcggatcccagtttaccaggcgtttgccacggtaaatcaggtcttctttatacagacgaacgaaaacttctttcaccgcattggacaggccttcgtccatggtgaagcgttcacgctcccagtcgacggagttgccgagacggcgcatctgacgggtaatggtgccgccagattccgctttccattcccagattttgtcgatgaaagcttcgcggccgtagtcgtgacgggttttaccttcttctgcggcaatcttgcgctcaacgaccatctgggtagcgatcccggcgtggtcagtaccgacctgccacagggtgtttttgccctgcatgcgctgatagcggatcatggtatccatgatggtttgctggaaggcgtgacccatatgcaaactgccggtgacgttcggcggcgggatcatgatgcagaaactttcctggctttcatcgccattaggcttaaagtagccctgcttttcccagtgctcgtaaagcggctgttcgatatcttgtgggttatatgtcttttccattatttccaggttgccgtattcaggttgaaaccagccacgcggtaggctttatagcgttcgcgcgccagttgtttcagagaatcttcataaggaacgaagtctaccacttctgtgaaagcggtggcaaaatctgcaaagcttgttcgcagactaatcaatatatcgcgccggctgctgctacgcttttgcggccaggcgatctccaccggtgcaccgccgcgcggtccttctcccgctaaattatgcggaacaaagctttctgccggacgcgcccacagggcttcatccagccggtaagcctgcttttcatcttcacaggcgatgagcacgcgcttaccgctgcgccaacgttctgcggcaatttcacacaccagttgctcaacggcgcttaagccatcgacggtggtgtcattgtccagaaggtagaacgtcgcgtttttcataaatggggcttcttgtggtggatttaaatacgcatcaggtatacaccgcagcgcctgatgcgacgctgttgtgtcttatcaggcctacgagttcagtgctgtgtaggtcggataaggcgttcacgccgcatccggcaataacagccttgcctgacgcaattactcttcgccgttaaacccagcgcggtttaacaggaactgtgccagcaacgctaccggacgaccggtggcgccttttgctttaccagaacgccaggcggtaccggcgatatccaggtgcgcccagttgtacttacgggtaaagcgactcaggaagcaacctgcggtaatcgccccaccaggacgaccgccaatgttcgccatatcggcaaaattggactccagttgttcctgatactcgtcacccagcggtaagcgccatgcgcggtcaccggattgttcagacgcggcaatcagttcatgggccagcggattatggttcgccatcagaccagtaatatgatgacccagcgcgatcacgcaggcaccggtcagcgtcgccacgtcaatcaccgcttccggctcaaaacgctcaacgtaagttaacacgtcgcacagtaccaggcggccttcagcgtcggtgttcagcacttcaacggtttgaccggacatggtggttaacacatcgcccggacgataggctcgtccgccaggcatgttttcgcagcctgccaacacgccgataacgttaatcggcagttgtagctccgcgaccatccgcatcacgccgtaaaccgctgccgcaccgcacatatcgtacttcatctcatccatgccttcactaggcttgatgctgataccgccggagtcgaaggttaaacctttacccaccagcacgattgggcgtgcatcttcgctcgcgttgcctttgtactcaatcacgctcatcaggctttcgttttggctaccctgaccgaccgccagataggaatgcatccccagctctttcatctgctgttcgccgataacgcgggtgatgacattcttgctgtagctgtcagccagctggcgcgcttgactagcgaggtaagcggcgttacagatattcggcggcatattgccgagatcttttgctgctttaatcccggcggcaatcgccagaccgtgctggatcgcgcgctcaccgctggtcagttcacggcgggtcggcacgttgaacaccatcttacgcagcggacgacgcggttcgctcttgttcgttttcagctgatcgaaactgtagagcgtctcttttgccgtctcgacagcctgacgcactttccagtagttgttacggcctttaacgtgcagctcagtcagaaagcagaccgcttccatactgccagtatcattcagcgtattaatggttttctgaataacctgcttgtactgacgctcatccagctcacgttctttgccgcaaccaataaggagaattcgctcggaaagtacattcggaacatggtgcagcaacaatgtctgccccggttttccttccagttcgccccgacgtagcagggcgctgatgtacccatcgctgattttatcgagctgttctgcaatcggagaaaggcgacgtggttcgaagacgcccacgacgatgcaggaactccgctgtttctccgggctaccgctttttacactaaactccatgcactacgctcctgaatcttaaagacaacggcggtggctacagatagaattgcaagctttcgtaactcatgtccgctgttgcgatgacttcgtgttaatcttaacgttattacggcattggcacgtcagaacaaaatctgagaggtgaatccgttgagtataattatcttagcgacgatttcgacgactcaagagaataaatgacgtttaagccatgaaacaagctaaaatcctgcaaaagacgagtttttacgggcgtatttaaagtgataatcataagatatctggtgcgggagacgctcaaaagccagctggcgatactcttcatcttgcttttgatcttcttctgtcaaaagttagtgaggatcctcggcgcagcggttgacggcgatattccggcgaatctggtgctctcccttctcgggttgggcgtgccggaaatggcgcagcttatcctgccattaagcctgttcctcgggctgctgatgacgctgggcaaactgtataccgaaagtgaaattacggtaatgcatgcctgcggcctgagcaaagcggttctggtgaaagcggcaatgatccttgcggtattcacggcaatcgtagcggcggttaacgtgatgtgggcgggaccgtggagtagccgtcatcaggatgaagtgttagcagaagcgaaagcgaaccctggcatggcggcgctggcgcaagggcaattccagcaagcgactaatggcagcagcgtgctgttcatcgaaagcgttgacggcagcgatttcaaagatgtgttcctcgcgcaaattcgaccaaaaggtaatgcacgtccttctgtggtggtggccgattccggacatttaacccagctgcgcgacggctcccaggtcgtcactctcaaccagggaacgcgcttcgaaggcactgcattgttacgtgatttccgcattacggacttccaggattatcaggcgatcattggtcaccaggcggtggcgctcgacccgaacgataccgaccagatggacatgcgcacattgtggaacactgacaccgatcgtgctcgcgcagaactgaactggcgtatcacgttggtattcaccgtgtttatgatggcacttatggtcgtaccgctgagcgtggttaacccacgtcagggacgcgtactgagcatgctgccagccatgctgctgtatctacttttcttcctgatccagacctccctgaaaagcaacggcggtaaaggtaagctggacccgacgctgtggatgtggaccgttaacctgatttatctggctttagcgattgttctcaacctttgggacaccgtgccggtccgccgcctgcgcgccagttttagccgtaaaggagcggtgtgatgcaaccttttggcgtacttgaccgctatatcggtaaaactattttcaccaccatcatgatgacactgttcatgctggtgagcctgagcggcattatcaagtttgtcgatcagctgaaaaaagccgggcaggggagttacgacgcgttaggcgcaggaatgtataccttgctgagcgtgccgaaagatgtgcagatcttcttcccgatggcggctctgcttggggcgttgcttggtcttgggatgctggcgcagcgcagcgaactggtggtgatgcaggcttctggttttacccgtatgcaggtggcgctgagcgtgatgaaaaccgccattccgctggtcttgctgacgatggcgattggcgaatgggtcgcgccgcagggcgagcagatggcgcgtaactaccgtgcgcaggcgatgtacggcggcagcttgctctctacccagcaaggcttatgggcgaaagatggcaacaacttcgtctacattgagcgggttaaaggtgacgaagagttaggtggcatcagcatttatgcctttaacgagaatcgtcgtctgcaatccgtacgctatgccgctactgcgaagtttgacccggaacataaagtctggcgtctgagccaggttgatgaatctgatctgaccaatccgaaacagattaccggtagccagacggtgagcggcacctggaaaaccaacctcacgccggacaaactgggcgtggtggcgctggacccggatgcactctctatcagcggtttgcacaactatgtgaagtatctgaagagcagcggtcaggatgccggacgttatcagctcaacatgtggagcaaaatcttccagccgctatctgtggcggtgatgatgctgatggcgctgagcttcatctttggcccactgcgtagcgtaccgatgggcgtgcgtgtggtcaccggtatcagtttcggttttgtcttctacgtactggaccagatcttcggcccgctgacgttggtttatggcatcccgccgatcatcggcgcactgttgccaagcgccagcttcttcttaatcagcctgtggctgttaatgagaaaaagctaaccgaatgaacgaataaagggagcgaaagctccctttattattgttagcaaagtgtgcttcgttcattcctgaaaaataattaaaattcaatatattgcagtggggtgggcatgataagacgcgccagcgtcgcatcaggcaaagacaaatctcgcctgacttaccttcttctcccccccagcaaactccccaacatcccgcgtacaatctgattcgtcacttggcgagcggcgcttttggccattgtttgcaccacaccatctttcttcccgccgcgtggtccggtagtgccgaacaaaatatccttcaatccaccaagaatgccgtcatccaccgctacctctttccctttcgcgggaggattattttgctgctcggtactggcctgaaagcctttttgcaacatctcataggcggattcccggtccacctcatcctcatatttgccatacaccggagagtgattaatcaagccattacgctcatcttccgtcaccggccccatccggctacaaggcgcgatcaccatcgcacgctccaccacagaagggcttcctttcgcatccagaaaagagatcaacgcctcgccggtgcccagttcctgaatcgccttttcggtatcaaacgccggattggcccgcatggtttgcgccgctgccttcactgctttctgatcttttggcgtaaaagcccgcaaagcatgttgaacgcgattaccgagctgcccgagcacattatccggaatatcagacgggttttggctaacgaaccagacgcccacgcctttactgcgaataagccttatcacctgctcaatcttatccagcagtacctgcggggcatcgttaaacagcagatgtgcctcgtcgaagaaaaacaccagttttggtttctccagatcgcccgcttccggcaattgttcatacaactcactaagcatccacagcaggctggcggcgtacagtttcggcatctgataaagtttctcggcgctgaggatattgataacgcctttaccgttggcatcggtgcgcatccagtctttgatatccagcatcggctcaccaaagaagtgtgctgcgccttgctgttccaggctcaacagcccgcgctggatggcaccaacgcttgcgctactgatattaccgtactgattctggaaggatttggcgttatcgccgatgtactgggtaattgcccgcagatctttaaagtcgagcagtaacagcccctgatcgtcagcaatgcggaagatgatattcagcacgccagattgcacatcgttgagattcaacagtcgtgccagcaacagcggccccagatcgctaaccgtcgcccgcaccggatggcctttctcgccaaagatatcccacaccaccaccggattggcatgcggttgccagtcattgacgccgatatttttaagccttgcgagcagtttttcgctcaccgttcctgcctgcgcgacgccggtcagatcgcctttcacatcagccataaacaccggcacgccgatttcgctcaaactctccgccagtttttgcagcgtaacggttttacccgtccccgttgcgccggtaatcagcccatgacggttagccattcccggcagtaaaaacagttctgtgtccggcgtgcgggcaattaacaggggttcactcatgagatatcctccagtttcctgcctggagtataggcaacgtccggcaaagagaatacgtgtaatgaagagaaaataacttaaagcgtgttgccgtgataaatctgatacccgaggtcaacagtgttgtggttgtgatcgttatttttaattttgctcagcaacatttgggcggccatccgaccaatatcaaaacggggagtaattacgctggcgaggcttgggatcatttgcctgccaatctccagcccatgaaaacccgcaatggaaatttgttctggcacggcgaggtttcgctcgcggcacagcagaagcgcacccatcgcaatatcgtcattggtgcaaaatacaccgtctaaatccgggtttgcgctaagggcatcacgcattaactgcattcctaaatgaatggaactgatggcgcgtggattcatgcgtaatggggaaagattatgcagcatcatcgcatcgcaatacccctgataacgctgttcatcgcgggtgtcatctttggaaccgagatacagaattttgtgcctgactcgcttctccagcatggtacacaccatgtcaaaagcggcctgccgattatcaaaaccgacctccatatccagccgttctccctgtacatccatcaattccacgaccggaatggtggcactacgcagaaatttcaccgtcctgatggtgtgatatttttcgctaagtataatcccgtcaatgttataagagagcaggttaatcacgctctcttcttcggaatcgcgatcgtaattgtaattagcaataagggtctgataattatgctcagaggtgacggattctattcccgcgagaatgtcagcgaagagttgattttgaaaactcggaatcaagataccgagggtataactttgtgcattcaacaacatgccgggagcgcgattagggatataattgatctcttccataattttggcgatgcgctcgcctgtttcctttgccacctttttcgggctgcggatataacgactcacggtcatttttgttacgccagccagcgtagcgatatcctgtaaagaaattctgtgattgcgcataacttctcccaacgtcgggggaatcttcaatcttcccccgaaactacatcacaatattttattctttcagtgcaatacggcgttaatggctaacacgcccagcaaacccataatagaaataagggtttccatcaccgtccaggtacgcaacgtttcaccaaccgtcagattaaaataccctttaaatagccagaagccagggtcgtttacgtgactcgcgatcacgctgcccgcaccggttgccagtaccattaaagcgggatcggcatgggtaacgttgataatcggcaacaccacacccgcggtggtaatggccgcgacggtggcagagcccagagcgatacgcaacagcgccgcaacagtccagcacatcaataacgggctaagtgtagttccggtcattaagtgactaatatagtgcccgacaccgctatctactaatacctgcttaaacgcgccgccgccagcgataataaacacaatcatcgcgatagcgcctatagaatccccaatgatatccatgatttgctcgatggtgcgtccattacgtcggcccagtgtgaaaatcgcaataacaatggcaataaacagcgcaacggcagggttaccgacaaattcaaagaagaggcgcacggtgttagttttcggtaacgtaatttcacaaacggcggcgatagccatcaggatgaccgggatcacggcagcgaaaatactgttccagaaggagggcatctcctcttcgctaaacagatgaggattaaataagccttccggtggtgctttctcaaagcgagttagcagtttagaaaacagcggtcctgcgacaataactgtcggaatggtaatgataaatccatacagtaaagtcgttccgagattagcctcaaagatagtcgcgatggcagtaggccctggatgtggcggcagaaaacagtgggttacagagagcgctgctaccattggtacgccaacatacaacaggggtaatccactacttgctacgatggtaaataccaacggcaacagcaggacaaaacccacttcaaaaaacatggcgaggcccacaaccagaccggtgatcactagcgcccattgcacgcgttttttaccaaaagtagcaatcagcgtagtggcgatacgttgtgccgcacccgtatcagaaatcagcttgcctaacatggccccgaaaccgaggatcattgccagcccgccgagcgtgctgccgataccattttgtatagagtgcaggacggcctgtgcatccatcccttcggcaaatccgacgacggcagctaccagaacgagggcaataaagccgttaactttaaagccgatcatcaggataagaagcagcgcgacgcctgccgcaataatgattaatggcatagtctttatctcttattagtgccagaaaagcagcgctttcgcgctgcacgtaggggggctgttaaacagccactaacatgccgccatcaacaaacaacaggtggccgtttacgaaatcagaggctttactagaaaggaacaccgcagcaccaatcagttcctgcggatctccccagcgtgcggcgggggtccgtttgcacaaccaggcggtgaaggcttcgtcctcaaccagtgctttagtcatttctgttttgaaatagcccggcgcaataccgttgacctgaatattgtggcgcgccagctcgacgcacatgccgcgggtgagcatttttaccgcccctttgcttgcggcataaggggtgatggtgtcacgtcccagttcgctttgcatgctgcaaatattaataactttacctgccttgcgttcaaccatgtgacgagttaccgcttggcttaccaggaacacggcggtctggtttactgcgatcacatcattccactcttgttcagggaactcagtaaaaggatgacggcgctggataccggcgttattcaccagcacatcaatggggccgatgtccttttcgatatgttcaacggcggcatcaatttcatgtttatgagtaacattaaaaggtgcggcaacggcctgaataccctcctggtggagtttttctacagcaagttctgcgcgttcggcagtaatatcattaataattatttgtgcgccatatttacccaggccggttgccagtaaaaagccaatgccctgtgcactaccggtaatcaagatattttttcctgccagactaaatagatcgttcattgtattattcctttatttatctcttagaaaacaagctggacttttgctgcctgggttttatcaccggcgaaacgtagcgcctcttccaggtcagtgaagggatattcagcactcagtaaaggcagtggattgataacgccattcgccagccaactcactgcggtattaaattcgctggtaaaacggaaagagcctctgagactaatctccttaccaatcaacgtcatcattgggaattctgccatcgcgcctcccatacctacctgcaccattacgccgcgtgcacgagtgacctccagacaggtattcacactactaggatgaccggacacttcaaagctgacatcgaaatagcctttttccgctttccagtgatccatgtcgtcgttttgtgggtttacgagcacatccgcccccatctctttgcccaggctaagggaacggggactcacatcagcacagacaatttccgcggcccccagtgttttcactgcactgacaatcaggcagccaatgggtccaacaccggaaataaatactcgcttgccctgtaactcgccggcctgatgtgcggcatgaatcgcgacggctaaaggttcggcaaaagccataaccttttcgtcagctttggccggataagggacacattggctcgtttcgaccattttataacgggtaaaaccaccatcaacatgagggaaatacatggcactgccaaaaaaacgcatatctgtacactgattctcgttatgttcaatgcagtatttgcagtgaccgcacggtttagacggattaatggctaccgtttgcccttcatgtaattcactactgtcgctatgaataactttaccgataacttcatgacctaacaccatcggtgcctttatcatgaaattacctacttttccttcctgataataatgtaaatcggaaccgcaaattccacctcgggttatttgtactaatgttccattattattccaatctatcgtctgctcggtaacggcaacagttttcttgcccgcaacaacgcaggactgtgttttcacttgcataaattcctcactggtcaggtagacacctcggaagcatttaagcggttttaactgtcattatttgtgatgaagatcacgtcagaaaattgttacattactatgttacgcataacgtgatgtgccttgtaattcttatcagtagaaataaaaaaacgtgaaattattatgccgccaggcgtagtatcgcagcaggtaagatgattcaggagattttaaatggcgggtgaaagctttattttgatgggcgttagtgggagtggtaaaacattaattggtagcaaggttgccgcgttattatctgctaaatttattgatggtgacgatcttcatccagccaaaaatatagataaaatgagccagggtattccattatctgatgaagatcgacttccctggctggaacgcttaaatgatgctagttacagtctttataaaaagaatgaaacaggatttattgtctgtagtagtttaaaaaaacagtatcgtgatattttacgcaagggtagcccccatgttcatttcctctggttagatggcgactatgaaactattctcgcgcgaatgcagcgtcgggctgggcattttatgccggtagcgttactaaaaagtcagtttgaggcactggagcgtccacaagcagatgaacaggatattgtgcgcattgatatcaaccatgatattgccaatgtcaccgaacaatgtcggcaggctgtgctggcgatacgacaaaacagaatatgtgcgaaagagggcagcgccagtgatcagcgctgcgaatgattttcaaaaatcggctttcaacaccacgcggtaacgcgccttaccgtcgcgcacatgctggatggcgtcgttaattttgctcatcgggaacagttcggtggtcggcgcaaccttgctgcgggcggcaaaacgcatcagcttacgcagctcataaggcgtgccggtagcagaaccagagacgctgcgatcgcccgcaattaacgtaaaggccggaacagacagcggcgtgagaaccgcaccgaccgtatggaaattaccgccataggtcagcgcctcaaaatagggctgccagtcgaggctgacgttgacggtgttgataatgagatcaaactgccccgccagtgctttcagtgcctgcggatcgcggctattcaccactttatcggcacccatcgccagcacttcctgctctttcgccggattagaactaaaggctgtcacctcgcatcccattgcgtgcagaagttttatagcgatatgccccagcccgccaataccaattaccccaacgcggctggtagcagtgatatggtgcatcaacagtggtttaaagaccgtgataccgccgcacaacagcggcccggcggactcgatatcaatattttctggcagtggaatcacccattgccagtccgcacgcaacttctcggcaaagccaccgcgattcataatcgtcggcaccgcaccttgctcgcagttgatctgattaccgctaatacaggcgtcgcagtgaccacagctacgcgccgtccagccaatcccgacacgctgaccgacctgcaaacctttatcctgcgcggcgctcccgagtgccaccacgcgcccaatcacctcatgcccggcaaccagcggatattgactaaatccccattcgttatcgatcatgctcagatcggaatggcagatcccgcagtaatccacctgcacttcaacatcttgtggcctcagctcaccgggatcgtactcataaacttccagttcgccgcccgcttcttttgcggcatagctttttatcatgctcattttttggtccttctctggtgttgtttgggaagtgtagagcatggcagggcggggtgcctggagtgtgacaaaggttacacatcgctgtatgcaatgctgaaaatttcagcacttagcgaggtgcgagcaagctggcgcttgcatggtggcgtgcgacaggtataatccacaacgttttccgcatacctcttcagtgccgaagtggcgaaatcggtagacgcagttgattcaaaatcaaccgtagaaatacgtgccggttcgagtccggccttcggcaccaaaagtatgtaaatagacctcaactgaggtctttttttatgcctgaaatccagtgtttatctatctttcccgctatattaactctctcaaggtcaaccgatatcaacgtacatctaccaacatatgttggtacagatgatggtatttccggttcgataatgcttgtaccaacagggagggaatacgagaaatcacaggacattgctaatgctggtacgcaatattacctgaagctaaaaacctgcacgttagccctttgtaggccagataagacgcgtcagcgtcgcatctggcataaacaaagcgcactttgctggtctgttcccctcaccctaaccctctccccggaggggcgaggggactgtccgggcacatttttagactttgtcatcagtctgagcctgccattggcaggctctggtgtccttttacgctaccatgctaataatcagcacaataatcagcccaaccacggagttgaccagctccagcagaccccaggttttcaacgtgtcttttacactcaggtcaaagtaacctttgaacaaccagaaagatgcatcgttaatgtgggtgagggtgttggaacccgcagccgtcgccagtaccagcagcgccggattcacgccaaccagctgaccagttgctggatctaggattgcagcactgataatcccggcggcggtcatcgcgctaacgacaccctgacccgtcgccagacgaattagcacagtgatcagccatgccatgatgtaggggctgatattgccgtgggacatcaacatgccgatggtgtcgccaatgccggtgtcgatgatggtctgcttcagcacgccacccgcaccgatgatcagaatcaccattgcaatactcttcaccgcgctttcaaaagcgttcatcacccactgcatgtcatgaccacgtgcggtgccaaagagtacgaatgcaaccaccatcgcaataaacattgcaatcgggctggaaccgataaagttaaccacttcccaggcaggggtatcttttaccagccagatattggcgatggtggtagagatcataatgatcgccgggatcagcggcaccagaatgctaacgccgaaagagggcagattattcatatctaccggttgatctgctttcaggaaacttggcgttgggcgctcaagattgccgaggaacttcggcaggatcagacctgcgcagattacacttgggatcgtcaccagtacgccatagatataaaccatccccatatccgcgccataagcattcaccagcgccaccggacccggctgcggtgggaacagactatgtgcggtagtggcagctgctactgccgggatcgccagtttcaggaacggaattttagcttcggcggcaataacaataaccagcggcgctaacatgataaaggccacttcatagaacatcgccagaccaaaaatcaggccgatgataatcacgctcagctgtacatagcgcagaccgagacgcgccagcagcgtatgcgctatctggtgagccgcgccggagtcgaccatcaatttaccgatgaccgcaccgaacaccacgatgatagccagttcccccagcgtgttgccgaagcccgctttcatagtgtgcagcaggctcatcaaatccatgcccgccagcatcccgacggacagcgccgccaccaacaaagccaccatactattgattttgaacttcaaattcagtaccagcatcagaccaatgccgaataccacccagagaatgttaagcacatgcataacgttttaccttacctggttgaaccgttgttattttgggcgatatgttatgtaaattggtcaaccattgttgcgatgaatgtcacatcctctgatcaataaccatcgattaccctttgctgcaatttgcagcaacaaccatgagagtgaaattcttgtgatgtggttaaccaatttcagaattcgggttgacatgtcttaccaaaaggtagaacttatacgccatctcatccgatgcaacgccacggctgcggtctggttgttcatccggatacctaaacaactccagggttccgcgtctctttgctgtggaacccactatgtgaaagaggaaaaatcatggaacagacctggcgctggtacggcccaaacgatccggtttctttagctgatgtccgtcaggcgggcgcaactggcgtggttaccgcgctgcaccatatcccgaacggcgaagtatggtccgttgaagagatcctcaaacgcaaggcgatcattgaagacgcaggcctggtgtggtctgtcgtagaaagcgtgccaattcacgaagatatcaaaacccacactggcaactatgagcagtggatcgctaactatcagcagactctgcgcaacctggcgcagtgtggcattcgcaccgtgtgctacaacttcatgccggtgctcgactggacccgtactgacctcgaatacgtgctgccagacggctccaaagctctgcgcttcgaccagatcgaattcgctgcattcgaaatgcatatcctgaaacgcccaggcgcggaagcggattacaccgaagaagaaattgctcaggcagctgaacgcttcgccactatgagcgatgaagacaaagcgcgtctgacccgtaacatcattgctggtcttccgggcgcggaagaaggctacaccctcgaccagttccgtaaacacctggagctgtacaaagatatcgacaaagcgaagctgcgcgaaaactttgccgtcttcctgaaagcgattattccagttgctgaagaagtcggcgtgcgtatggctgttcacccggacgatccgccgcgcccgatcctcggcctgccgcgcattgtttccaccattgaagatatgcagtggatggttgataccgtaaacagcatggcaaacggttttaccatgtgcaccggttcctacggcgtgcgtgctgacaacgatctggttgatatgatcaagcagttcggtccgcgtatttacttcacccatctgcgctccaccatgcgtgaagataacccgaaaaccttccacgaagcggcgcacctgaacggtgacgttgatatgtacgaagtggtgaaagcgattgttgaagaagaacaccgtcgtaaagcggaaggcaaagaagacctgatcccgatgcgtccggaccacggtcatcagatgctggacgacctgaagaagaaaaccaacccaggttactccgcaattggtcgtctgaaaggcctggccgaagttcgcggtgtcgaactggcgatccagcgcgctttctttagccgttaatatccaccggcatggctgcgcgccgtgccggttccttcttccttgccgtcactctttgaagacggattctggagtttacgatgactactattgttgacagcaatctgccggttgcccgcccgagttgggatcattctcgtctggaaagtcgcattgtgcatctcggttgcggggcgtttcaccgcgcgcaccaggcgctgtatacccatcatctgctggaaagcaccgacagcgactggggcatctgcgaagttaacctgatgccaggcaacgaccgcgtgctgatcgaaaacctgaaaaaacagcaactgctgtacaccgtagcggaaaaaggcgcagagagcaccgagctgaaaattatcggtagcatgaaagaagcgctgcatccggaaatcgatggctgcgaaggtattctcaacgcgatggcgcgtccgcaaacggcgattgtctctctaacggtcacggaaaaaggctactgcgctgatgcggcaagcggtcaactggatctcaataacccgctgatcaagcacgatctggaaaacccgactgcgccgaagtccgcgattggttacatcgtcgaagcgttgcgtctgcgtcgtgaaaaagggttgaaagcgtttacggtgatgtcctgcgataacgtgcgtgaaaacggtcatgtggcgaaggtcgcggtactggggctggctcaggcgcgtgacccgcagctggcggcatggattgaagaaaatgtcaccttcccgtgcaccatggttgaccgcatcgttccggcggcgacgccagaaaccttacaggaaattgctgaccagctgggtgtttacgacccgtgcgccattgcctgcgaaccgttccgtcagtgggtgattgaagataacttcgttaatggtcgcccggattgggataaagtgggcgcacagttcgttgcagacgttgtgccgttcgaaatgatgaagctgcgtatgctgaacggcagccactcttttctggcgtacctcggttacctcggcggctatgaaaccattgccgacaccgtgactaacccggcttatcgcaaagcggcctttgccctgatgatgcaggaacaagcgccaacgctgagcatgccggaaggtacagacctgaacgcctatgcgacgctgctgatcgagcgtttcagcaacccgtctctgcgtcaccgtacctggcagattgcgatggacggcagccagaagttaccgcagcgtctgctggacccggtgcgtctgcacctgcaaaacggcggcagctggcgtcacctggcgctgggcgtggctggctggatgcgttacacccagggcgtggatgagcagggtaatgccattgacgtggtcgacccgatgctggcggagttccagaagatcaacgcgcagtatcagggcgcagaccgcgtgaaagcgctgctgggcctgagcggtatttttgccgatgatctgccgcagaatgccgactttgttggcgcagtgacggcggcatatcagcagctgtgcgaacgcggtgcgcgcgagtgtgtggctgcgctgtaactaactgattaccctacagacttactggtcaatcaaactgatatttggttgaccagttttcgtttttttgcccacctgtacgtgccaacttccagtgctaatggtatagtttgagattaacgggggccgtaaaattgcccgttgtaggccggataaggcgttcacgccgcatccggcaaaaatttgattaaccgcacctaacggacacaacaccatgaaatctgccacctctgcgcaaagaccttaccaggaagtcggggcgatgatccgcgatctgatcataaagacgccgtacaatcctggcgaacggctgccgccggagcgtgaaattgcagaaatgcttgatgtcacgcggacggtggtacgtgaagcgctgatcatgctggagatcaaagggctggtggaagtacgccggggtgccggtatctatgttcttgataacagtggcagccagaacacagacagtccggatgccaacgtctgcaacgatgccggtccttttgagctgttacaggcgcggcagttattggagagcaacatcgccgagtttgccgctttgcaggctacccgcgaagatatcgtcaaaatgcgtcaggcattgcaactggaagagcgtgaactggcttccagtgcgccgggcagcagcgaaagcggtgacatgcagttccatctcgctattgccgaagcaacgcataacagcatgctggtggagctgttccgtcagtcctggcagtggcgggaaaacaatccaatgtggatccagttgcacagccatctggatgacagcctgtatcgcaaagagtggttgggcgatcacaaacagatcctcgccgcgttaatcaaaaaagatgcccgagcggcgaagctggcaatgtggcagcatctggaaaacgttaagcaacgtctgctggaattcagcaacgttgacgatatttattttgatggctatctgtttgatagttggccgctggataaagtcgacgcctgacttattataataagcgcaagggtaaacgttccttgcgctttcttaaattaagaagtcgcaatgagtattactttgtaaattgcagggtattgtttagctatctgtataacctgaatgttagtactcattcttcctggtagtaaggcgagattattaaagttgccatgcagcgtccggggaagtgttgggcgctgttttttttgtttcttaataatgtgttgtaagccgtagaaggcgtgtaggtcgcaccctatgcgacctacacatcagtcaggaattacccttcacgttctaccactttaatttccaccatgccgatcccgagcttacgcgggctgtgtccgaggatattcccttcgttggtactgacaggttccggcggcacaattaccagtgtgtcggcatcggttgggttatcgaaatgcagtgtggtggtggtcacttcattgcccagcacaagagtttgttcttcattgcctacgcgtaccggaataggacggctggcgttattgccgtatgctttggcggtaatcaccaggtcaaatttcttcggcagcggatgcttgtactcgatttttacttcatcgcccagctgcgcgttggaccagcggccccagctctccggacgggaaatcccgctaaactgtttcacctcttctggcgcaccggcgacgttaaagatgaaactgtcggctttgtagcgaatatcgttatcaacaatcttcagcgtatcgacattgcctttgtaacgcgccatgtcgatgaccgtatctttaaatgccgttttgccctgccatgttgttttgtcaacatgctgaacaatttgctgaccgccaagctgcccttggctgacacaccagtcggtggaaagtgccagttccggagcccagagttgtgccatcttgtagcaacggtcaacccagacgaaattgtcgcgtggagcgaaatcggccagctggaaacgcagcggtgcactgtattcgctttccggcagcggttccacgcgtttgtcactaacccgcaacagcagcggcaaacggaaatggctaccgctgaaggcaatcatgtttttctgctggtcgatggtgaactctttcatctctttagggaatttccacaggcggatgatatctggcttccacgccaatgttttctctttgatattgaggaagatttcgctcatgctctgcccggataaactgctacgaccaagtccgagatagttatcgccaccgagaatgtccagcaccgtcgcgccgttatccatcgtgttacgcttcactgccagcgtctcttgctgcggcttgtcgccacgaatgacaaaaaacaggttattgcgatcctgcttattgaggtatttccacgccgtgttgttcatcgctaaatggtcagaagagacgacgatgacggtatctttaaaccacggactcgctttgattttgttgataaacgtcgcgatgttctcctggctgcaacttaccgcgctgaaactctgattcggtttaccgtcaaaatcatattttttgcggttacaggtacgagagataaaaccatccgggtgatgggtatcgactgtcagggtaaacagactgaatcgctgaccactgcgggaaagctcttcaaactttttccacgcttcatcgagaacggtatcgtcgtagaatccccagtcgttgcgatagtgcgggtcggctaccacgcttttcagctcttcactgccgtataagtggtcgaagccatggctcttcaggaacacatctttaccggcaaaacgcagattcgcgccctgcacgaaatagttctgataaccgctgtttttcaggatatctcccagacagatgttctgcgggaagaagctggagacagaggcggaggcgttgccttcaaagggggcaaacagcggtatgccgcactgagaagccaccatgcccgcaatcgtgtaatctgttcccggcagctgctgcgtgtggctgaaatccaggccttcatttttcaacgcgcccagttcaggcgtgagatccgggaaagcctcgttatcaaaataggtccgctcgagactttcgccgtagatataaaccaggttgagtttcgggtcagggatagttttgctcggctctttataataagccgcaaagtccgggtcgccgtcgcgactctgggatttcaccagttccgttatctgacgaaatgccgggctggcgtccacgctacccagcgccagtaagagcgccagcaggctgtaaccaaaatggtgcggatgatggcgacgacggcgcaggatccagcccagcgcaccgaacaccgctgtcagccccagcacaatgccgatacccggcaaaatgtatttgctgacgccagcaccggtcaggctgttggttaaggtatagagaaccgcgtcgttaataccatcgccagtaaaatagtcgctggcaaacagggtgatatttaaaacgacaaatagccccagcaccgttaacgtggctgcaaaccaccaggtgttacgtcccgctttccatgcgtaaatcagcacagaggcgagaaaaagggcgaaagagagtagttcactcaacgggcgatcctcactaaaccgggccgtttagccaacgtttaagctttttgagaagcacaatgtaatggcgtcgccatattgctgcaattctagtgtcaaaaaaatgcgatgttgttaggaattagtttataaacagacttttttgattacggtcacttcccgtgtaacaggggtaaaaccgtccaggagcagggaaaagggcaggagagagccgcgtcagccgggtaacagctaaaacgcggcgtttcgcggttcaggaaatgaagttcagcccctgttttaacaccagatcgcaggctttggttttcaccttttctgccagcggagttgttccgatgttatccagattgagttgctgaccatctttggttttcagcaaaccctgaatgccgtccagatagttggtgtcttctttttgctcttcactgttcaggcccagcttttccagcacctggttcttgatgttttcggcatcggttacgctcgccagcttttgcttcgcgcagtattgcagaatgcctgcggcattgttcatgttatctgcgcttaaggcctggtttccgctgctaagcaagttagttaaactcgcgaggctccaaccgccttcctgtgtcgtgctgttttggttgccaagttcgctggcggcgctggagagcgcatctttccaggacgcagcatgcaccccggtggaaattaatgcgctggcggcaatggcacagcacagaagatgtttaacagttttcatcatcattactcaaggtggaattgtgtcgcagtataccgccagaaacggggattaatactctttacctgttacccggctacggtagctatcccagttgaagatcacccacaaactgttacccaggcgcatacggtccatcacgcgttcgcccagcaacttggtcatctcttccatattactgttggtcagcatcccggttgggcgtttggaagaagagcggcgatcgacgatctggttgatgatcactttttcgtatttgctttcggtctgcacgccgatctcatcgatcaccagcagatcaacgttgctcagatcgttaagcagttgttcttcgctggtaccgctattcctgaaggtatctttcatcgcgctcataatatcggccacggtgatgatcaatacggatttaccgcgtagcagcagctcgttgcagattgccgccgccagatggtttttgccggttcctggcttaccagaaaagatgaagctggcgatgttgccgtcaaactcttcgacatactggcgcgctttgcttaacgcattcatctgcccttcacactcaacgcgatagttctcaaaggaacagttctgatgcagtggacgaataccggagcggttaaaggtgcgctgcattttcatcgcccgattttcacgttcgagagcggcggagcggatcgctccttgttctttttgccaggccagtagttcttcacccgttttgaatgcgggtttgatatgggcaggcatcattttttgcaggcgttgcatcaggtcgccaacgtttttcatcgttaccctctgaatcctggtggaatttggctgtcaggttcgctgaccgtattcacatctcgtttcggcagtccgccgttgctggcacgaccgatttgcaggctgcgcgccagtttttgttgccactgcacatggtgaaagactttaccttccgcctgccagtaggcaatgaaactggccagttcttcggtggtcaccggctctcttagcgccacgccccatagcgccgccaggcggataaaatcggcatcgggttgccagtccggatacatggcgaatttccccatgggtacagcaacgggagcggcttgcggttcctgatagagttgatcgtccagagcgacatcgcttcccggacgcgccagcttttcttccagcgccagcagttcagccaggcgtgcaggcgtgacggcataaaacgccggggcattgttagcaaatacggcaaccacaccgccttcagcttttgccagaacggtttggtgatcgtgtaccagggcgtcaataccaacgacgtccggggtcaaaactctggaagacatactgtttctcaaatatggaacgatgaacgagaagggagataacttttatagtaacacacggaggagaggaggctgtctctcatccgtgtgcttaagcgaggcaattttatacgcgagggcgcttgcggtacaaccataatccaggaatggaaagaccgatggataacgcaccaacaatgctactagctgtaagaaagttggttaacagggtaatcatcaacggttcgctgtaacctaactggctgatttttaccgcgctaatcattgcggtataagcgcttatgcccgggaacatagggataacggccgccacggtaaacactttcggatgcgccagataccagcggctccattgaataccaatggtaccgaccagcatagaagccataaaggtactccactcaatattcaacccgctggtcatcaagatcattcgggaaccatgacctatcgagccaagcagcgcacaccagcgtaacgcccgcacgggaacgttgaacaccatcgcaaagccgaccgcaggaatggcggcgaggatcatatcctgcgccaacgctaacagaaattcgatcacacccatccgcgtagcccccaaatcgtcagtgccatcactacgccgacgcaggtagccagtgtcagcagactggcgatcgcccagcgtgccagtccggtattgatgtggcctttaaacatatcggcgacggcattaatcaacggaaagcccggcactagcagcagaacgctggcggccatcgcaatggtgggggtattgctgaaagtggggagttgcaaaagcaatccggaaatggtggtggcggcgaaagcggtaaggcaaaagttgatctgtggatgaagatgacgttgtgccagcagctggcggatatacatcgcggtcgtactggcaaagaaggtgatgacggcaccatcccagccaccgttattgagtttacagaaacaggcgcaagaaaggccaaccattaaggctaccagccatcttgggtaacgtaatggctgaatttggctaaatcgtttctctacgcctttgtaatccagcagatgatgctccgcaagaatcacaatgtgctggacttcagtcaccacatgcatattaatgccgcgatcgtgatttttacgtgtgcttgtcaggcattgcccatctttaatagttgtcagcactatggcgttgctagagatagaactttcgacgctgtccattcccagtgcccgacccagtcgactggaaagctcatcaaccaacgcgctttccgcaccatgttgcaaaagaaataatccacactggatacaaagccgtgttacggctcgctgttgctcagtttgcataactcgccctttgtcatagacgtgctgcgtattgttcagataatgagaatccatttgtatcatgaagcacggttgttttgcggtaggttaagatcaaaattgcgctgattaatcctggttatcgggagaagctcggtgataaaaagcgaattatctctcgccgcaaacaaactatcacatgaatattatcatcataatgaatttattgtttggcctttacgaatcaggataatagataaccgggcacgttttttaatgttaacaagctaaaaccatcagatttcattgaataaatattggttgtgtgattttgcattctgcgggaagggatatcatttaattataaattaaatgaatgtgatttctgtttttcattaagtattcctaacaacttaatgtagatattttaaatgtctccaggctatttcaccaggttatcatttgatgctaaccttctgacacatgcagtggagttgttgtgcagcaggagtatgctgatatgaaagtgaatgctaaggataatttattcgcttaatctattaatttgctggaaacatttaaggaatgaatatcctgaataaaccatcataatttttagacagtggatgtggaggaaatatgttgccaggatgctgcaaaaatggaattgttatcagtaaaatacctgttatgcaagcagggttaaaagaggtcatgaggactcacttccctgaatatgaaataatatccagcgcctctgcggaggaccttaccttattacaattacgtcgttccggattagtcattgctgatttagccggtgaaagtgaagatccacgttctgtttgtgaacattattattctttaatcagtcaatatcgggaaattcactgggttttcatggtgagtcgctcctggtattcccaggcagtagaactgctcatgtgccctacggcgacgttattgtctgatgttgaacccattgagaatctggtcaagaccgtacgttccggcaatacgcacgcagagcgtatcagcgccatgctgacctccccggcaatgactgaaactcatgattttagctatcgctccgtcattctcactcttagtgagcgcaaggtactgcggctattaggtaaaggatggggcatcaaccagatagctagtttgcttaagaaaagtaataaaactatcagcgcccaaaaaaacagtgcgatgcgtcgactggcaattcacagcaacgctgaaatgtatgcatggataaatagcgcgcagggtgcaagagaacttaacttgccttctgtttatggagatgccgcagaatggaacacagccgaattaagaagagaaatgagccacagttaaaaaaatgcgtcatgagtagtatcggtattgagagtttattcagaaagtttgcgggtaacccttataagctccatacctataccagtcaggagagttttcaggatgccatgagccggatcagctttgcggcggtcattttttctttttctgccatgagaagtgagcgcagagagggattatcttgcctgactgaactggcgattaagtttccgcgtacccggcgtttagttattgcggatgatgatattgaagctcggctgattggtagtttgagcccaagtccgctggacggtgtattaagtaaagcgagtacgctggagatttttcatcaggaactctttttgagtttaaatggtgtacgtcaggcgaccgaccgactgaacaatcagtggtacattaaccaaagccggacgttaagcccgacggagagagaaatattgcgctttatgagccgtggctacagtatgacacaaattgccgagcagcttaaacgcaatatcaaaacgatccgtgcacataaatttaatgtgatgagcaaactgggcgtcagttctgacgcagggttgttggaggccgcagatattctgttatgtatgcggcattgcgaaacaagtaatgtgttgcatccctattaatccgcatgatgccgggtttacttccccggcagtgctttcatttcagcgtacaatcgccacattgctgcacatccggtaagcgataacgctggcagcaagtgcggcgcaccagcaggccgtcgcgcagtaccacggtacgccagagtggattatcttcaccgttcgtgagcgttttctcaaaaaagagggcatggcgcaggctttcaacagtagcctcgccgagcagttgcttcatctcagtgagataccagttgatcaaataaccggtattactccagataagtttgccgttgatctctccggtcgcttctagtgcttgcacaaccggaaccagcgcctggctgattaacgtttccattcgatgctgcgggctatgtggtgttgcgtttttatcttcacacacatcgacccagaaacaggcgacgcgtccggtttcgtgaaactcagcatggaaatgttccgggctcacatctaatgccttttcctgcgtcagtagcgccagcattaatggtggcaccatcaggccgatataccattgtgcccatagactgatcagcggtttgttctcgcggatcatcatcggttggttgcgatagatatgatcggaatagaccgccagcagagaacttagcacattcggactactccattgcgccagcgtcatggcgttaagtggggcaggttcatccaggcggataaactccagcaaatgttcacgatgttttgcgatcgtcgcccgcacggcttgcgcaagcgtgggatcctgcggctggagatgcgttcgccagatgacatcttcatagagcggtgcggaacgataggccataatcgggatagtaatctaaatgataatgattgctaatcatagcgataggtttacccgatagcaagggatttatctggcttgcaaatgataaaaattatcatatgatattggttatcattatcaatgaaagagatgaaatcatgttgcaacgtacgctgggcagtggctggggagtgttgctgccgggattgctgattgcggggctgatgtatgcggatttaagcagtgatcagtggcggattgtcattctgatgggattagtattgacgccgatgatgctgtatcacaaacagttgcggcattacattttgctaccaagctgcctggcacttattgctggcatcatgctgatgataatgaatttgaatcagggatgaaaaatcaaggaagaaacaagaaaggaagtaaagataattggtgcgaggggggggacttgaacccccacgtccgtaaggacactaacacctgaagctagcgcgtctaccaattccgccaccttcgcacagtcatcttactttttttgatatcgcctcgtttggtgcgaggggggggacttgaacccccacgtccgtaagaacactaacacctgaagctagcgcgtctaccaattccgccaccttcgcccagtgcgagcaatatcaacgtggtttttggtgcgagggggggacttgaacccccacgtccgtaaggacactaacacctgaagctagcgcgtctaccaattccgccaccttcgcataccatcaattcttaaaaagaattgctaccacggaggcgcattctagtggttttcagcttttcgtcaatagttaattatcgacagaggtgtaattgctggaaaaatgtccatcaggaaactagcgtgcaggtttggtatgcatgcgggggcagatgccagatgcgacgctggcgcgtcttatctggcctacgaagggctaacgtgcaggttttgtaggtcggataaggcgttcacgccgcatccgacacggtattcggcgagataattaacctttcttcgcctggcgggtcataatggcgcgatacaccttgaagcgccctgtttgcgcgatcacttcgtggaagccaaatgtctcatccagcacgtccggataaggcaggaaggcgttcgctacaattcgcagctcgccgccgctattaagatgacgcaccgcaccgcgaatcagcgtttgcgccgcatccaggctggtttgcatcccatcgtggaacggcgggttggagatgatcatatcaaaacgacctttcacctcggaaaagacgttgctggcaaagacttcaccttcaacaccgttggccgcaagtgttgcgcggctggcttctaccgccggggcagagacatcgcacaaggtgagacgaattttcgggctatggcgcgcaaaggcaacactaagcacgcccgcgccacagccgacatccagcactttacctttcgtgtgcggagttaacgtgctgagcagcaactggctaccgacatccagaccgtcgcggctaaacacgccaggcagcgttttgaccgtcaggccatcgacgctgtattcgccccagaatttctccgcatcaaataccggctgtttttccagacgaccaaaatagaggccacagcgacgagcgctgtcgactttattcaacggcgcataatctgccagcatctgctcggcgctgcgcacgccgctgcggttctcgccaacgacaaaaatatctgtccccactggcagcagagaaagtaaattcatcaactggaactgggcttccggtttgttcttcggccagtagtaaatcagcgtatcgcaatctgcgacgtcatccgccgtggcgaccagactgaaacgggcgttatcccccatctggcggcttaatacctgccagtggtggaattgctgggtatgagcacggctggccgcggtatctaaacgcgcgggcaggtcatcctgtaagtctccggcaaacagaatacggctttgttcgaaatcatcactgtgacgcagcaagacttcacttgccggggtaaatgcagacatggaatgctcctcaattgatactggcggcgattatagccatatgttggcgcggtatcgacgaatttgctatatttgcgcccctgacaacaggagcgattcgctatgacatcccgacgagactggcagttacagcaactgggcattacccagtggagcctgcgtcgccctggcgcgttgcagggggagattgccattgcgatcccggcacacgtccgtctggtgatggtggcaaacgatcttcccgccctgactgatcctttagtgagcgatgttctgcgcgcattaaccgtcagccccgaccaggtgctgcaactgacgccagaaaaaatcgcgatgctgccgcaaggcagtcactgcaacagttggcggttgggtactgacgaaccgctaagtctggaaggcgctcaggtggcaagtccggcgctcaccgatttacgggcaaacccaacggcacgcgccgcgttatggcaacaaatttgcacatatgaacacgatttcttccctcgaaacgactgatttaccggcggcttaccacattgaacaacgcgcccacgcctttccgtggagtgaaaaaacgtttgccagcaaccagggcgagcgttatctcaactttcagttaacgcaaaacggcaaaatggcggcgtttgcgattacgcaagtggtgctggatgaagctacattgttcaatattgcggtcgatcctgactatcagcgtcagggattgggaagggcgctgctggaacatctgatcgacgaactggaaaaacgcggcgtggcgacactatggctggaagtccgtgctagtaacgctgccgccattgccctgtacgaaagtttaggctttaacgaggcgacgattcgccgcaattactaccccaccacggacggtcgcgaagacgccatcatcatggcgttgccaatcagtatgtaatacaaggtggaataatgaagtgggactggattttctttgatgccgatgaaacgctgtttacctttgacagtttcaccggcctgcagcggatgtttcttgattacagcgtcacctttaccgctgaagattttcaggactatcaggccgttaacaagccactgtgggtggattatcaaaacggcgcgatcactagtttacagcttcagcacgggcggtttgagagctgggccgaacggctgaacgtcgagccaggtaaactcaacgaagcctttattaatgcgatggcggaaatctgcacgccgctgccgggcgcggtttctctgcttaacgccattcgtggcaacgccaaaatcggcatcatcaccaacggctttagtgccttgcaacaggtgcgtctggaacgcacgggcctgcgtgattacttcgatttgctggtgatttccgaagaagttggcgttgccaaaccgaataagaaaattttcgattatgcgctggaacaggcgggcaatcctgaccgtagtcgcgtgctgatggttggcgacactgccgagtccgatattctcggtggcatcaacgccgggcttgcgacctgctggctgaatgcacaccatcgcgagcaaccagaaggcatcgcgcccacctggaccgtttctagcttgcacgaactggagcagctcctgtgtaaacactgattgcctcccccccgttgatgggtaaaatagccgcaatttttcgttttcaacaagcgcggcgcgatgccgcttactcaagaagaaagaattatgacgttgtctccttatttgcaagaggtggcgaagcgccgcacttttgccattatttctcacccggacgccggtaagactaccatcaccgagaaggtgctgctgttcggacaggccattcagaccgccggtacagtaaaaggccgtggttccaaccagcacgctaagagcgactggatggagatggaaaagcagcgtgggatctccattactacgtctgtgatgcagtttccgtatcacgattgcctggttaacctgctcgacaccccggggcacgaagacttcagcgaagatacctatcgtaccctgacggcggtggactgctgcctgatggttatcgacgccgcaaaaggtgttgaagatcgtacccgtaagctgatggaagttacccgtctgcgcgacacgccgatcctcacctttatgaacaaacttgaccgtgatatccgcgacccgatggagctgctcgatgaagttgagaacgagctgaaaatcggctgtgcgccgatcacctggccgattggctgcggcaagctgtttaaaggcgtttaccacctttataaagacgaaacctatctctatcagagcggtaaaggccacaccattcaggaagtccgcattgttaaagggctgaataacccggatctcgatgctgcggttggtgaagatctggcacagcagctgcgtgacgaactggaactggtgaaaggcgcgtctaacgagttcgacaaagagctgttccttgcgggcgaaatcactccggtattcttcggtactgcgctgggtaacttcggcgtcgatcatatgttggatggcctggtggagtgggcacctgcgccgatgccgcgtcagactgatacccgtaccgtagaagcgagcgaagataaatttaccggcttcgtatttaaaattcaggccaacatggacccgaaacaccgcgaccgcgtggcgtttatgcgtgtggtgtccggtaaatatgaaaaaggcatgaaactgcgccaggtgcgcactgcgaaagatgtggtgatctccgacgcgctgacctttatggcgggtgaccgtagccacgttgaagaagcgtatccgggcgatatcctcggcctgcacaaccacggcaccattcagatcggcgacacctttacccagggtgagatgatgaagttcaccggtattccgaacttcgcaccagaactgttccgtcgtatccgcctgaaagatccgctgaagcaaaaacagctgctcaaagggctggtacagctttccgaagagggcgcggtgcaggtgttccgtccaatctccaacaacgatctgatcgttggtgcagttggtgtgctgcagtttgatgtggtggtagcgcgcctgaagagcgaatacaacgttgaagcagtgtatgagagtgtcaacgttgccactgcccgctgggtagaatgtgcagacgcgaagaaattcgaagagttcaagcgtaagaacgaaagccaactggcgcttgatggcggcgataacctcgcttacatcgctaccagcatggtcaacctgcgcctggcacaggaacgttatccggacgttcagttccaccagacccgcgagcattaattcttgcctccagggcgcggtagccgctgcgccctgtcaatttcccttccttattagccgcttacggaatgttcttaaaacattcacttttgcttatgttttcgctgatatcccgagcggtttcaaaattgtgatctatatttaacaaagtgatgacatttctgacggcgttaaataccgttcaatgcgtagatatcagtatctaaagccgtcgattgtcattctaccgatattaataactgattcagaggctgtaatggtcgttattcatcactcatcgcttttgtgatggcgaccattgacttctgtagagggtgaagtctctccctattcagcaatgcaacctcgtgttgccaggctcaaattacgagcaaacatacaggaataaatcgatgactatgacaagactgaagattagcaaaactctgctggctgtaatgttgacctctgccgtcgcgaccggctctgcctacgcggaaaacaacgcgcagactaccaatgaaagcgcagggcaaaaagtcgatagctctatgaataaagtcggtaatttcatggatgacagcgccatcaccgcgaaagtgaaggcggccctggtggatcatgacaacatcaagagcaccgatatctctgtaaaaaccgatcaaaaagtcgtgaccctgagcggtttcgttgaaagccaggcccaggccgaagaggcagtgaaagtggcgaaaggcgttgaaggggtgacctctgtcagcgacaaactgcacgttcgcgacgctaaagaaggcagcgtgaagggctacgcgggtgacaccgccaccaccagtgaaatcaaagccaaactgctggcggacgatatcgtcccttcccgtcatgtgaaagttgaaaccaccgacggcgtggttcagctctccggtaccgtcgattctcaggcacaaagtgaccgtgctgaaagtatcgccaaagcggtagatggtgtgaaaagcgttaaaaatgatctgaaaactaagtaattcgtcgtaattcgtcctcccgaactttgtcgggaggcgcgatgtgcaccacactaaaaatatcgcattgagtgattttcacgctcatatcaagcggtgacattaactatggtaaaggagacgcttatgtttcgttggggcatcatatttctggttatcgcgttaatcgccgccgcacttgggtttggtggtctggccggtaccgctgcaggcgcagctaaaattgtctttgtcgtcgggattattctgttcctggtgagtttgttcatgggccgaaaacgaccctaaatttcagaccattaagaaaattttatccaaagccagtccagcggactggcttttgcggttttagcgaataataaattgcgttactttgtcattctttcacaacaaaaacaggaaggcagaggtggggcagcgaatacctgtaacgcttggtaatattgcgccgttgagcctaaggccgttccagcctggacgaatagctctggtgtgcgaaggcggcggacagcgtggaattttcacggctggcgtgctggatgagtttatgcgcgcgcagtttaatcctttcgatctttatctcggcacatctgccggggcgcagaacctcagcgcgtttatctgcaatcagcccggttacgcgcgcaaagtcatcatgcgctataccacaaaacgcgaatttttcgatccattgcgctttgtccgtggaggaaatcttatcgatctcgactggctggtggaggccactgcaagccagatgccgttgcaaatggataccgccgcgcggttgtttgacagcggcaaaagcttttatatgtgcgcctgtcgtcaggatgactacgcgccgaattactttttaccaaccaaacaaaactggctggatgtgattcgcgcctccagtgcgatacctggcttttatcgtagcggagtgagcctggaaggcattaactacctggatggcgggatcagtgatgcgattccggttaaagaggcggcaaggcagggcgctaaaacgttggtcgtcattcgcactgtgccgagtcaaatgtactacacgccgcagtggttcaaacgcatggaacgctggctgggtgacagtagcctgcagccgctggtcaatctggtgcagcatcatgaaaccagctatcgtgacattcagcaatttattgagaaaccaccgggcaagctgcggatattcgaaatttatccgccgaagccattacatagtatcgcgcttggcagtcggattccggcgctgcgtgaagactataaacttgggcgtttatgcggtcgttatttcctcgccacggttggcaagctattaactgaaaaagcgccgcttacccgccatctggtgccagtggtgacgccggaaagcattgtcattccgcctgcgccagtcgccaacgatacgctggttgccgaagtgagcgacgctccgcaggcgaacgacccgacatttaacaatgaggatctggcttgatttgccgttttatcgacacccactgccattttgatttcccgccgtttagtggcgatgaagaggccagcctgcaacgcgcggcacaagcgggcgtaggcaagatcattgttccggcaacagaggcggaaaattttgcccgtgtgttggcattagcggaaaattatcaaccgctgtatgccgcattgggcttgcatcctggtatgttggaaaaacatagcgatgtgtctcttgagcagctacagcaggcgctggaaaggcgtccggcgaaggtggtggcggtgggggagatcggtctggatctctttggcgacgatccgcaatttgagaggcagcagtggttactcgacgaacaactgaaactggcgaaacgctacgatctgccggtgatcctgcatagtcggcgcacgcacgacaaactggcgatgcatcttaaacgccacgatttaccgcgcactggcgtggttcacggtttttccggcagcctgcaacaggccgaacggtttgtacagctgggctacaaaattggcgtaggcggtactatcacctatccacgcgccagtaaaacccgcgatgtcatcgcaaaattaccgctggcaagcttattgctggaaaccgacgcgccggatatgccgctcaacggttttcaggggcagcctaaccgcccggagcaggctgcccgtgtgttcgccgtgctttgcgagttgcgccgggaaccggcggatgagattgcgcaagcgttgcttaataacacgtatacgttgtttaacgtgccgtaagccggataaggcgttcacgccgcatccggcagttggcgcacaatgcctgatgcgacgcttaacgcgtcttatcatgcctacaggtttgtgccgaaccgtaggccggataaggcgttcacgccgcatccggcagttggcgcacaatgcctgatgcgacgcttgtcgcgtcttatcatgcctacaagtctgtgccgaaccgtaggccggataaggcgttcacgccgcatccggcagtcggcgcataatgcctgatgcgacgcttgtcgcgtcttatcatgcctacaggtttgtgccgaaccgtaggccggataaggcgttcgcgccgcatccggcagttggcgcacaatgcctgatgcgacgcttgacgcgtcttatcaggcctacaagtctgtgccgaaccgtaggccgtatccggcatgtcacaaatagagcgccggaaatatcaaccggctcaccccgcgcacctttaacgcatcagccaacggctcaacgtcttccggcgtggcgctcgcccagctttgcgcctcgccatacacgccgtgggcatgaaacgcgttcaggcgtaccggaacatcgccgagtcccttgataaacgccgccagttcttcgatgtgttgcaaataatccacctggccagggatcaccagcaaacgcagttccgccagcttgccgcgctctgccagcaaatagatgctgcgcttaatctgctgattatcgcgtccggtgagttgttgatgacattcgctcccccacgctttgagatcgagcattgcgccgtcgcacaccgggagcaatttttcccagccggtttcgctcaacatgccgttactgtccaccagacaggtgagatggcgcagttgcggatcgtttttgatagcagtaaacagcgccaccacaaacggcagctgggtcgtggcttcaccgccactcaccgttatcccttcgataaacagcactgctttgcggacatggctaagcacttcgtccacgctcatggattgcgccatgggcgtggcatgttgcggacacctcttcaggcaggtatcacactgctcgcaaaccacagcgttccacaccactttgccgtcaacaatctgcaacgcctgatgcggacactgtggcacgcactccccacagtcattgcaacgtcccatcgtccacggattgtgacagtttttgcagcgcagattgcagccctgcaaaaacagagccagacgactgcctggcccgtcaacgcaggagaaggggataatcttactgactaaagcgcatctgctgttcatggcttatcacgcgcggctggcgttccagaatacgagtgttgcgtgcggcttcttcgcccagccaggtggtgttggtgcgactaccttcggcgcgatatttttctaaatcgctcaaacgcaccatataaccggtaacgcgaaccagatcgttaccgctgacattggcggtaaattcacgcattccggctttaaaggcaccgaggcaaagctgtaccagtgcctgcgggttacgtttgatggtttcgtcgagcgtcagaatgtcgctgatgccggaataataataagcatgatgcggggcgacagtttgcagatgggtgatcggatctggctcatcgccatacggcaaacgcgcgcccggcgtggtgccgatatcggaactgatcccgctctgtgcgtgtaacatggcgcgtttttgccagccatatttcacgggggtattggcgacaaactccgccagttgcgcgctgatgcgataacctacttcatttgcggcggcttctttaccgtagcgcgcggcaatcccttctttttcacacagcaagttaaccgcttccgccagcccatacatgccaaacattggcacaaaacgttcagggttaatcagcccttctttcaccaggaagctattctcaaagaagtgactttgttgatagaggaattcacaccgcgcatcgatgatggcgatctgctgctggcagtagtgcggtagagtgcgcgtaaagaagtcatccaggctttcgctgcgctcggcaatggctttcaggttaaggcgtaccagcgtgctgccaccacccgccagcggcagactgttgtaacagctcacaatcccgtagcccccttttgtgaaaattttatcatgcaccggaccgttggcgatgtgcggtttgctacattcacagatgttcttcgccacttccagcagcaggtcatcaggggtgatttcaggatcgtagataaaggtcaggttcggactaacctgcttcaactctgcatctgcacgtaagatcgcgcgggtaatggggctatcagacgggccgatattggcgtgcataaaggcgtctggcagggttctgtcgaggtaacgccagaaacgttttattcgaacatcgatctcgtcttgtgttagaattctaacatacggttgcaacaacgcatccagttgccccaggtagaccggcatgcttgtgacgctcggtacgtggtggtaaagaatggtcagcagagagagtgcgtcatcaagatctttcgcgccttccagctccagccattcggaaccgttcgccagaaaacgggcgtaatcgggtaagacatagcgcggtttgtacggcgcatgaccttcaaacatatcgcagattacaccttcatccagcgcgcggcgggcttcggcaggaagctgtgggtaaggcagattgttttctgcttccagtgccagaaaatggcgcttctgctccgggctaagcactgggctggtgacaatttgctggcaacgttgttgcagtgcattttcatgagaagtgggcatcttcttttccttttatgccgaaggtgatgcgccattgtaagaagtttcgtgatgttcactttgatcctgatgcgtttgccaccactgacgcattcatttgaaagtgaattatttgaaccagatcgcattacagtgatgcaaacttgtaagtagatttccttaattgtgatgtgtatcgaagtgtgttgcggagtagatgttagaatactaacaaactcgcaaggtgaattttattggcgacaagccaggagaatgaaatgactgatctgaaagcaagcagcctgcgtgcactgaaattgatggacctgaccaccctgaatgacgacgacaccgacgagaaagtgatcgccctgtgtcatcaggccaaaactccggtcggcaataccgccgctatctgtatctatcctcgctttatcccgattgctcgcaaaactctgaaagagcagggcaccccggaaatccgtatcgctacggtaaccaacttcccacacggtaacgacgacatcgacatcgcgctggcagaaacccgtgcggcaatcgcctacggtgctgatgaagttgacgttgtgttcccgtaccgcgcgctgatggcgggtaacgagcaggttggttttgacctggtgaaagcctgtaaagaggcttgcgcggcagcgaatgtactgctgaaagtgatcatcgaaaccggcgaactgaaagacgaagcgctgatccgtaaagcgtctgaaatctccatcaaagcgggtgcggacttcatcaaaacctctaccggtaaagtggctgtgaacgcgacgccggaaagcgcgcgcatcatgatggaagtgatccgtgatatgggcgtagaaaaaaccgttggtttcaaaccggcgggcggcgtgcgtactgcggaagatgcgcagaaatatctcgccattgcagatgaactgttcggtgctgactgggcagatgcgcgtcactaccgctttggcgcttccagcctgctggcaagcctgctgaaagcgctgggtcacggcgacggtaagagcgccagcagctactaagtaagatgctttacgcctgatgcgctgcgcttatcaggcctacgagacgtatctacccgtaggccggataaggcgtagacgcatccggcaaaagccgcctcatactcttttcctcgggaggttaccttgtttctcgcacaagaaattattcgtaaaaaacgtgatggtcatgcgctgagcgatgaagaaattcgtttctttatcaacggtattcgcgacaacactatctccgaagggcagattgccgccctcgcgatgaccattttcttccacgatatgacaatgcctgagcgtgtcagcctgaccatggcgatgcgagatagtggaaccgttctcgactggaaaagcctgcatctgaatggcccgattgttgataaacactccaccggtggcgtcggcgatgtgactagcctgatgttggggccgatggtcgcagcctgcggcggctatattccgatgatctctggtcgcggcctcggtcatactggcggtacgctcgacaaactggaatccatccctggcttcgacattttcccggatgacaaccgtttccgcgaaattattaaagacgtcggcgtggcgattatcggtcagaccagtagtctggctccggctgataaacgtttctacgcgacccgtgatattaccgcaaccgtggactccatcccgctgatcaccgcctctattctggcgaagaaacttgcggaaggtctggacgcgctggtgatggacgtgaaagtgggtagcggcgcgtttatgccgacctacgaactctctgaagcccttgccgaagcgattgttggcgtggctaacggcgctggcgtgcgcaccaccgcgctgctcaccgacatgaatcaggtactggcctccagtgcaggtaacgcggttgaagttcgtgaagcggtgcagttcctgacgggtgaatatcgtaacccgcgtctgtttgatgtcacgatggcgctgtgcgtggagatgctgatctccggcaaactggcgaaagatgacgccgaagcgcgcgcgaaattgcaggcggtgctggacaacggtaaagcggcagaagtctttggtcgtatggtagcggcacaaaaaggcccgaccgacttcgttgagaactacgcgaagtatctgccgacagcgatgctgacgaaagcagtctatgctgataccgaaggttttgtcagtgaaatggatacccgcgcgctggggatggcagtggttgcaatgggcggcggacgccgtcaggcatctgacaccatcgattacagcgtcggctttactgatatggcgcgtctgggcgaccaggtagacggtcagcgtccgctggcggttatccacgcgaaagacgaaaacaactggcaggaagcggcgaaagcggtgaaagcggcaattaaacttgccgataaagcaccggaaagcacaccaactgtctatcgccgtatcagcgaataacggtatactgatctgatcatttaaatttgaagcactgagtacggagaacatatgaaacgtgcatttattatggtgctggacagtttcggcatcggcgctacagaagatgcagaacgctttggtgacgtcggggctgacaccctgggtcatatcgcagaagcttgtgccaaaggcgaagctgataacggtcgtaaaggcccgctcaatctgccaaatctgacccgtctggggctggcgaaagcacacgaaggttctaccggtttcattccggcgggaatggacggcaacgctgaagttatcggcgcgtacgcatgggcgcacgaaatgagttccggtaaagataccccgtctggtcactgggaaattgccggtgtcccggttctgtttgagtggggatatttctccgatcacgaaaacagcttcccgcaagagctgctggataaactggtcgaacgcgctaatctgccgggttacctcggtaactgccactcttccggtacggtcattctggatcaactgggcgaagagcacatgaaaaccggcaagccgattttctatacctccgctgactccgtgttccagattgcctgccatgaagaaactttcggtctggataaactctacgaactgtgcgaaatcgcccgtgaagagctgaccaacggcggctacaatatcggtcgtgttatcgctcgtccgtttatcggcgacaaagccggtaacttccagcgtaccggtaaccgtcacgacctggctgttgagccgccagcaccgaccgtgctgcagaaactggttgatgaaaaacacggccaggtggtttctgtcggtaaaattgcggacatctacgccaactgcggtatcaccaaaaaagtgaaagcgactggcctggacgcgctgtttgacgccaccatcaaagagatgaaagaagcgggtgataacaccatcgtcttcaccaacttcgttgacttcgactcttcctggggccaccgtcgcgacgtcgccggttatgccgcgggtctggaactgttcgaccgccgtctgccggagctgatgtctctgctgcgcgatgacgacatcctgatcctcaccgctgaccacggttgcgatccgacctggaccggtactgaccacacgcgtgaacacattccggtactggtatatggcccgaaagtaaaaccgggcagtctgggtcatcgtgaaaccttcgcggatatcggccagactctggcaaaatattttggtacttctgatatggaatatggcaaagccatgttctgatggatttgggcggagcgttgactccgcctttgttatgtcacaaaaaggataaaacaatggctaccccacacattaatgcagaaatgggcgatttcgctgacgtagttttgatgccaggcgacccgctgcgtgcgaagtatattgctgaaactttccttgaagatgcccgtgaagtgaacaacgttcgcggtatgctgggcttcaccggtacttacaaaggccgcaaaatttccgtaatgggtcacggtatgggtatcccgtcctgctccatctacaccaaagaactgatcaccgatttcggcgtgaagaaaattatccgcgtgggttcctgtggcgcagttctgccgcacgtaaaactgcgcgacgtcgttatcggtatgggtgcctgcaccgattccaaagttaaccgcatccgttttaaagaccatgactttgccgctatcgctgacttcgacatggtgcgtaacgcagtagatgcagctaaagcactgggtattgatgctcgcgtgggtaacctgttctccgctgacctgttctactctccggacggcgaaatgttcgacgtgatggaaaaatacggcattctcggcgtggaaatggaagcggctggtatctacggcgtcgctgcagaatttggcgcgaaagccctgaccatctgcaccgtatctgaccacatccgcactcacgagcagaccactgccgctgagcgtcagactaccttcaacgacatgatcaaaatcgcactggaatccgttctgctgggcgataaagagtaattgtgtttcgctgcaaggcgattgccttgtgaagccggagcgggagactgctccggctttttagtatctattcatttttctctccagcttgaatattttcgctatacttttcagtgaaatgtgttaataaatctattcaagtatctattcacgaatctattcattaatgagcgagctgactgatcttttactgcaagggccgcgttctgccccggaattgcgccagcgtctggcaatcagtcaggcgacgttcagtcgccttgttgccagagaagatcgggtgattcgctttggtaaagcacgggcaacgcgatatgcactgctgcgtccttatcgcggaattgagcgtattcccgtctggcgggtggacgataccggaaaggcgcataaattcgccgacatccggttgtgctggccgcagggaagttgtctggtaacaggcgcagatggcgacgaacagtggtttgatggtttgccctggtatttgaccgatctccgaccgcagggctttttagggcgcgcgtggggcaggaagttagccgcgcaactgaatctgactgatgatatacgtctctggcaggaagaagatgtgctctacgccctgaccgtatttaacggtgaatatactggcggttggttggtcggggaggggaattatcagcgatggattactgcacaacaccctgcggaaattcctctggatcaaaaactcacccattacgaacagctggcaagtgatgcactggcaggagaaattgtgggttcttctgcgggcggcgagcagccaaaatttacctactatgcacaaacgccgagtggcaataaacatgtgttggtgaaattcaccgtaccacagcaaaccgcggtcagccaacgttggggtgacctgctaattgctgaatctattgccgcgcaaatcctgcgtgacggtgggatccacgccatcgagagtacggtgcttgtaacaagtaacaggcaggtattcctcgaagcggaacgctttgactgcaaaggtaacgatggtcgcttgcctattgtgagcctggaggcggtgcagagtgagtttatctcttctccgggaagctggccgcaggcaatgcgccgtttgtgtgagcaacaacttgtcactcaccagagcgtggcgcaaacagaagtgatctgggcatttgggcgacttatcgccaacagcgatatgcacgcaggtaatttaagcttttatttatctgaaccgccatttgcgctgacgcccgtctacgacatgctgccgatggtctatgcaccaaacagcgctggaatgctgcgtgatgctgccattgaggtgaagtttgatcttaacgtcagtaaaagcgcttggttaacggcgatcccgctggcgcagcagttctggcaaacggtcgccagagatccgcgtatcagcgaggcgtttcgccacattgcgcaagaaatgccggaaaaaatccggcaaatcgaagagaaagttgcccgcatgggcgggtaattaccttacagcccccgccatccatgcgcttaactcccgtagctctttttcctgttccgggaagtcaaccaacagcgcttcgcactcctgttgcagcatatctgcgcggtacaggcagccttgcagtcgtccggcgagggcttccagcggcgcggggttgaggctgtcggtaaacacctgggcgcgggtgatatggcctttttcaacgtcgaaatgcagttccacgccgccccaggtaaagcgttcatccagcagatggctgaatgccggagcctgaccgaagttccattcccagctactctggcgggcaaaggtttcggcgaagtttggcaagtctggcgttttgttcggggagatgatttccgcttccacgcgctcgccataatgggcgaaaaaggcctcggttatggcctcgcaaacctgctcatgggtgatccccggcaacagctcggtgaggttggtcacgcgggaacgtacgctcgtaatgcctttcgccgccagtttctttttatccggattgagatagtttgccaggcggctgaggtcggcattgagtagcaaggtgccgtggtggaagccgcgatctttggtttcgcgataggcgctgccactgactttgcggtcgccttcgacggttttcaccaccagatcgttacgtccggacgcttcggcgctgacgccgagcgcgttcagcgcattgagcacaatgctcgtggagatagttttatcgtactccggcttgccagccataaaggtaaagcaggtattgccgagatcgtggaacaccgcgccgccaccgctactgcgccgcgccaggcggacgttatcttcttccatccgccgggtattacactctttccacgggttctgcgcgcgaccaattactaccgtgtcggcattgcgccagagaaacagaacgcgctgcgtggcgggcatttggcgaaaaatacactcttccaccgccaggttaaaccacgggtcgtaagagtcagagatgagcaggcgtaatgtggacataacgatttcctttcttgtagtaatgggtcactcttttttctcgctttcttcctcttccggcaccggtttgctggcggctaacaggaaggggctttgctgccagcgggtgcgtttaccctgtagcagcgtgcgggtcagcactacaccgattgccagactgagcagcaacatcaggcgtaaaatgttagtggtgttatccacctgttgggcttcggtggcgagcgtatgggtgtcgagtgtcaggcgcagatagccgagcggtccgtttttacccgcaattggctcgacaatctgctggttaaaatagccgcctgcttttttaccgtcgagcgccagccggtcgcgcacttcgacgctttcgccagaacgtgcgataagatcgccttgttcgtcatacacacccgcgtcgaggatacggctttcatccgttaactgatcgaggatcgcctgaatgcgtttttcatccggactgtcggtacgcatcagcggtgcaacgttcagcgtcacctgacgcgccagggtgcgggccagttcttccagctgtggattacgctgtcgctggtggttttgactaaaccaactcgctccctgcatcagcgccactaacaaggcaagacagaacaggacaatcactgcccgatgcagccggaatttcagttttgtgcgagccatcttccaccctttgaaaatttgagacttaatgttgccagaagcaatggatacaaggtagcctcatgcgttattttccctgcttcgaacgattttacaggagccttaatgcctaacattacctggtgcgacctgcctgaagatgtctctttatggccgggtctgcctcttagtttaagtggtgatgaagtgatgccactggattaccacgcaggtcgtagcggctggctgctgtatggtcgtgggctggataaacaacgtctgacccaataccagagcaaactgggtgcggcgatggtgattgttgccgcctggtgcgtggaagattatcaggtgattcgtctggcaggtagtctcaccgcacgggctacacgcctggcccacgaagcgcagctggatgtcgccccgctggggaaaatcccgcacctgcgcacgccgggtttgctggtgatggatatggactccaccgccatccagattgaatgtattgatgaaattgccaaactggccggaacgggcgagatggtggcggaagtaaccgaacgggcgatgcgcggcgaactcgattttaccgccagcctgcgcagccgtgtggcgacgctgaaaggcgctgacgccaatattctgcaacaggtgcgtgaaaatctgccgctgatgccaggcttaacgcaactggtgctcaagctggaaacgctgggctggaaagtggcgattgcctccggcggctttactttctttgctgaatacctgcgcgacaagctgcgcctgaccgccgtggtagccaatgaactggagatcatggacggtaaatttaccggcaatgtgatcggcgacatcgtagacgcgcagtacaaagcgaaaactctgactcgcctcgcgcaggagtatgaaatcccgctggcgcagaccgtggcgattggcgatggagccaatgacctgccgatgatcaaagcggcagggctggggattgcctaccatgccaagccaaaagtgaatgaaaaggcggaagtcaccatccgtcacgctgacctgatgggggtattctgcatcctcagtggcagcctgaatcagaagtaattgctcgcccgccatcctgcgggcggcacagcattaacgaggtacaccgtggcaaaagctccaaaacgcgcctttgtttgtaatgaatgcggggccgattatccgcgctggcaggggcagtgcagtgcctgtcatgcctggaacaccatcaccgaggtgcgtcttgctgcgagcccaatggtggcgcgtaacgagcgtctcagcggctatgccggtagcgccggggtggcaaaagtccagaaactctccgatatcagccttgaagagctgccgcgtttttccaccggatttaaagagttcgaccgcgtactaggcggcggcgtggtgccaggaagtgccattctgattggcggtaaccctggtgcggggaaatccacgctgctactgcaaacgctgtgcaaactggcccagcagatgaaaacgctgtatgtcaccggcgaagagagcctgcaacaggtggcaatgcgcgctcatcgccttggcctgccgactgacaatctcaatatgttgagcgaaaccagcatcgaacagatctgcctgattgccgaagaagagcaaccgaagctgatggtaattgacagcatccaggtgatgcatatggcggatgtacagagtagccctggtagcgtggcgcaggtgcgtgaaacggcggcttatttgacacgcttcgccaaaacgcgcggtgtggcgattgtcatggtggggcacgtaaccaaagatggtagcctggctggcccgaaagtgctggaacactgtatcgactgtagcgtgcttttggatggcgatgccgactcccgttttcgcaccttgcgcagccataaaaaccgcttcggcgcggtgaatgagctgggcgtcttcgcgatgaccgaacaggggctgcgtgaagtcagcaaccctagcgcaattttcttaagtcgcggcgatgaagtgacctccggtagcagtgtgatggtggtatgggaaggaacgcgtccactgctggtggagattcaggcgctggtcgatcacagcatgatggcgaacccacgccgcgtggcagtggggctggaacaaaaccgtctggcaatcctgctggctgtgttgcaccgtcacggtggtctgcaaatggccgatcaggatgtgtttgtgaacgtggtcggcggcgtgaaggtaaccgaaaccagtgccgacttagcgttactgctggcgatggtttccagcctgcgcgacagaccgctgccgcaggatctggtggtgtttggtgaagtcgggctggcaggggagatccgcccggtgcccagcggtcaggaacgaatctctgaagcggcgaaacacggttttcgccgggcgattgttccggcggctaacgtgccgaaaaaagcgccggaagggatgcagatttttggcgttaaaaaactctccgacgcgcttagcgtgttcgacgacttataatgagatatacggagggagatatgagcagttttgattacctgaaaactgccatcaagcaacagggctgcacgctacagcaggtagctgatgccagcggtatgaccaaagggtatttaagccagttactgaatgccaaaatcaaaagccccagcgcgcaaaagctggaggcgttgcaccgttttttggggcttgagtttccccggcagaagaaaacgatcggtgtcgtattcggtaagttctacccactgcataccggacatatctaccttatccagcgcgcctgtagccaggttgacgagctgcatatcattatgggttttgacgatacccgtgaccgcgcgttgttcgaagacagtgccatgagccagcagccgaccgtgccggatcgtctgcgttggttattgcaaacttttaaatatcagaaaaatattcgcattcatgctttcaacgaagagggcatggagccgtatccgcacggctgggatgtgtggagcaacggcatcaaaaagtttatggctgaaaaagggatccagccggatctgatctacaccagcgaagaagccgatgcgccacagtatatggaacatctggggatcgagacggtgctggtcgatccgaaacgtacctttatgagtatcagcggtgcgcagatccgcgaaaacccgttccgctactgggaatatattcctaccgaagtgaagccgttttttgtgcgtaccgtggcgatccttggcggcgagagcagcggtaaatccaccctggtaaacaaacttgccaatatcttcaacaccaccagtgcgtgggaatatggccgcgattatgtctttagtcacctcggcggtgatgagatcgcattgcagtattctgactacgataaaatcgcgctgggccacgctcaatacattgattttgcggtgaaatatgccaataaagtggcatttatcgataccgattttgtcaccactcaggcgttctgcaaaaagtacgaagggcgggaacatccgttcgtgcaggcgctgattgatgaataccgtttcgatctggtgatcctgctggagaacaacacgccgtgggtggcggatggtttacgcagcctcggcagtagcgtggatcgcaaagagttccagaacttgctggtggagatgctcgaagagaacaatatcgaatttgtgcgggttgaagaggaagattacgacagtcgtttcctgcgctgcgtggaactggtgcgggagatgatgggggagcagagataaccgtgatgaaactgctcaaaggcgaggtataaaatgagtttttttgatgagttgaaaacctctctggaagaggctgtcgagattaaacaaggtttgaaaaaacctgcacgggtgacccgccacgaaattgaggatgctaaggctgttgtagaccggaaacggtgttcacgccgcatccggcattcggtgctcaatgcctgatgcgacgcttaccgcgtcttatcaggcctacagttttacaacgtattgaaattgctggttttgtaggccggataaggcgttcgcgccgcatccggcattttacgcattacttcgcaatacgcttgtacttgatacgcttcggctccagcgcgtctgcgcccagcgtgcgtttcttgtactcttcgtactcggtaaagttaccttcgaagaactcaactttaccttcatcctggtaatccagaatgtgcgtggcgatacggtcgaggaaccaacggtcgtggctgataaccatcgcacagcccgggaactccagcagggcgttttccagcgcgcgcagggtttcgatatccaggtcgttggttggttcgtcgagcagcagcatgttgccgccaacctgcagcagcttcgccagatgcagacgaccgcgctcaccaccggagagttcaccaacgcgtttaccctgatcaacccctttaaagttaaagcggccaacgtaggcgcggcttggcatctcggtgttgccgatcttcatgatatccagcccgccggaaacttcttcccaaacggttttgctgttatccatactgtcacggaactgatcaacgctcgccagtttcaccgtttcacccaaagtgatggtgccgctgtccggctgttcctgaccagagatcatacggaacagggtgcttttacccgcaccgttcggaccgatgatcccgacgatcgctcctttcgggatgctgaagctcaggtcatcaatcagcagacgatcgccataggatttacgcaggttgctgacttccagcactttatcgcccagacgcggtccaggtggaataaacagttcgttggtttcgttacgtttctgatattcggtgctgttcagttcttcaaagcgcgccagacgtgctttacctttgctctgacggcctttagtaccttgacgtacccattccagctctttctcaatgctcttacgacgcgccgcttcttgactagcttcctgcgccaggcgctgatctttctgctccagccaggaggagtagttaccttcccacggaataccttcaccgcggtcaagttcgaggatccagcctgcaacgttatcgaggaagtaacggtcgtgggtaatcgccacaacggtgccttcgaagtcgtgcaggaagcgttccagccaggccacggattcggcatccaggtggttggtcggttcgtcgagcagcagcatgtctggtttttccagcagcaggcggcacaacgctacgcgacgacgttcaccaccggagaggttagcgattttcgcgtcccagtccggcagacgtagcgcatccgccgcacgctccagctgtacgttcagattatgaccgtcgtgagcctgaatgatctcttccagacggccttgttcagcggccagcttgtcaaaatcggcatccggatcggcgtacagcgcatacacttcatccaggcgtttcagggcgttaaccacttcactaaccgcttcttcaatggactcacgcacggtgtgttccgggttcagctgcggttcctgcggcagataaccaatcttgatgtctggctgcggacgcgcttcaccttcgatgtctttatcaatgcccgccataatgcgcagcagggtggacttacccgcgccattcagacccaggacaccaatttttgccccagggaagaaactcagagagatgtttttcaaaatatgacgtttcggcggaacaactttgccgacacgatgcatggtataaacgaattgagccacgttggacttcgcctctatgtttatcgtgataatgagttttcaaaggcgaagtgtagcctttttccccgcctaatcccagccggtcgatcaccctcgcagtaaaagtaaaaaagtgtccgtaacgtggcgtaaacggcaatgactggttagcataaatctattacgcggcatgacgctgcattgatgtatttacacttagaggatgcgcttgtggaaaaagccaaacaagttacctggcggctgttggctgccggtgtctgtctgctgacggtcagcagcgtggcgcgagccgacagtctggatgagcagcgtagtcgttacgcgcaaatcaagcaggcctgggataatcgacaaatggatgtggtcgaacaaatgatgcctggactgaaggattatccgctttatccctacctggaataccgccagatcaccgatgatctgatgaatcaaccggcggtgacggtcactaactttgttcgcgctaaccccacgcttcctcccgctcgcacgctgcaatctcgtttcgtcaatgaactggcgcggcgtgaagactggcgtggcttgttagcctttagcccggaaaagcccggaactaccgaagcgcaatgtaattactactatgcgaaatggaacaccgggcagagtgaagaagcctggcaaggggcgaaagagctgtggctaaccggcaagagccagcctaacgcctgtgacaagttatttagcgtctggcgtgcgagtggtaaacaagatccgctggcgtatttagagcgtatccgtctggcgatgaaagcgggtaacacaggcctggtaacagtgctggcagggcagatgcctgccgattaccagactatcgccagcgcaatcattagtctggcgaacaaccctaatacggtactgaccttcgcgcgtacaactggcgcgaccgattttacccgtcaaatggcggcggtggcgtttgccagtgtggcgcggcaggatgctgagaatgcacggctgatgatcccaagccttgcccaggcgcagcagcttaatgaagatcagattcaggagctgcgcgatatcgtcgcctggcgtttgatgggcaacgatgtcaccgacgagcaggcgaaatggcgcgatgacgccattatgcgcagccaatctactagccttattgaacgccgtgtacgaatggcgcttggcaccggcgatcgtcgcggcctgaatacctggctggcgcgtctgcctatggaagcgaaagagaaagatgaatggcgttactggcaggcggatttattgctggaacgcggacgtgaagctgaagcaaaagagattttgcatcaactcatgcaacagcgtggtttctacccgatggttgcagcacaacgcatcggcgaagagtatgagctgaagattgataaagcgccgcagaatgttgacagcgccctgactcaggggccggagatggcgcgcgtgcgcgagttgatgtactggaatctcgataataccgcgcgtagcgagtgggccaatctggtgaagagcaagagtaaaacagagcaggctcaactggcgcggtatgctttcaacaaccaatggtgggatcttagcgttcaggcaacgatcgccgggaagctgtgggatcatctggaagagcgattcccgctggcttacaacgatcttttcaagcgctacaccagcggtaaggagatcccgcaaagctatgcgatggcgattgctcgtcaggagagcgcctggaatccgaaagtgaaaagtccggtaggggccagcggcttgatgcagattatgcctggtacagcgacccatacggtgaagatgttctctattcccggttatagcagtcctgggcaattgctggatccggaaacgaatatcaacattggcaccagttacctgcaatatgtttatcagcagtttggcaataatcgtattttctccagtgcagcttataacgccggaccagggcgggtgcgaacctggcttggcaacagcgccgggcgtatcgacgcagtggcatttgtcgagagtattccattctccgagacgcgcggttatgtgaagaacgtgctggcttatgacgcttactaccgctatttcatgggggataaaccgacgttgatgagcgccacggaatggggacgtcgttactgatccgcacgtttatgatatgctatcgtactctttagcgagtacaaccgggggaggcattttgcttcccccgctaacaatggcgacatattatggcccaacaaagtccctatagtgcagcgatggcagaacagcgtcaccaggagtggttacgttttgtcgacctgcttaagaatgcctaccaaaacgatctccatttaccgttgttaaacctgatgctgacgccagatgagcgcgaagcgttggggactcgcgtgcgtattgtcgaagagctgttgcgcggcgaaatgagccagcgtgagttaaaaaatgaactcggcgcaggcatcgcgacgattacgcgtggatctaacagcctgaaagccgcgcccgtcgagctgcgccagtggctggaagaggtgttgctgaaaagcgattgattttgtaggcctgataagacgtggcgcatcaggcatcgtgcaccgaatgccggatgcggcgtgaacgccttatccgtcctacaaatacccgtaatttcaatatgtttggtaggcatgataagacgcggcagcgtcgcatcaggcgcttaatacacggcattatgaaacggactcagcgccaggatcaccgcctggtgatagacgctggcgcgagtgagtttcccggcggtaaacacgccgatcgccccttccttacgaccaatctcatcaataccggtataacggctcatcacgggaccaagcgcctcaccttcacgcactttttccagaatcaccgcaggcaacggcaaagtagcgctacgcgcctcgccgcgctggctggcgttttcaatcaccacccaactgaaagtgctgtcaccatcgatgccagcttcaatcgccacccaaaaatcagcctctggaagtaaacggcgggcattggctacccgatttcgtgcgccagcgcgcgtttcctcactgccaaagggctgttccggtacaccgctctcgacggcaacggatgcaatatggcaggatccttcgccgaagatctcgtgaaatgcctgcagaatggcctgaattttagcgggattggtggtcgcacagacaacttggtgcataatcagcattactcagaaaattaacgttacagcagtatacggaaaaaagcatgttacaggtatacctagtccgccacggtgaaacgcagtggaacgccgagcgacgtattcagggccagtctgacagcccgctgaccgccaaaggtgagcaacaggcgatgcaggtggcaacccgtgccaaagagcttggcattacgcatatcatcagtagcgatttaggacgcacccggcgtacggcggaaatcatcgcccaggcctgcggctgtgacatcatctttgattctcgcctgcgtgaattaaacatgggtgtgctggaaaaaagacatatcgattctctgaccgaagaagaagagaactggcgtcggcagctggtcaatggcaccgttgacgggcgtattcctgaaggcgagagtatgcaggagctcagcgatcgcgtcaatgcggcactggaatcttgccgggacttaccgcagggaagccgaccgctgctggtgagtcatggtattgcactgggatgcctggtgagtacgattctcggattaccagcatgggcagagcgccgcttacgtctgcgtaactgttctattagccgcgtggattatcaggaaagcctgtggctggcgtctggctgggtcgttgaaaccgcaggggacatcagccatctggacgcccctgcattagatgagctgcagcgttaacgacggatcggaatcagcagttcacagcgtagattaattgggcgatctcccgctttggcatcttctgccgggtagtatcgctcaatatcctgacctttacggcgcgtcaggttgagcattggcatgcacgttccgtataccgtcaggataaactcctgcacgccggttcccagaccttcataggtaaacatcacatattcgccgccctgcagcatcaccggatgccccgtcagtacatagccatctgcctgatcctgggctaacgcggtggtatagaatacctcttgctcgtcgtctttatcctgactcggacgcgtttcattcaggccgtagagcaccggcggaatggtcggcgcgttgccgagaaaatcgtgccagaactgataacgcatttcatggcggaaatcagagatttgctccaggctacaggagtagctctgggtaacaccaatcagcggcgtatcttccagggtgacaaatttgtgctctggcatagtgaattcacccaggcgtagcggcgggcgaataccaaaggcgctccattcaggagaacggcggtaaagtgcaggagtctgggcaaactgcttcttgaatgcgcgggtaaatgtctgttgagagtcgaagcggtattgcagcgcgatgtccagaatcggacgcgcagtcaggcgtagtgcgaccgcgcttttgctcaaacgacgagcacgaatatacgcgccaatagcatggccagtgacatctttaaacattctctgtaagtgccacttggaataacctgctttcgccgctacattgtcgaggctcaggggctgatccagatgaccttccagccagattaaaaggtcgcgaataatgccggcctgatccataaaatatcctcatcctttcaacaacgagcacctgacatcaggtaattggataatagcattttttgctgttttagcattcagtgtttttttcttagtagagtatgttttagggcttgacggaaataaaagtattgagattttgttcttaatcaatatgttatttaccgtgacgaactaattgctcgtgtaatagataaaaatggtaacaatatgaaatacaagcatttgatcctgtctttaagcctgataatgctggggccattggctcatgcagaagagattggtagcgtcgacaccgtatttaaaatgatcggcccggatcacaaaattgttgtggaagcctttgatgatcccgatgtgaaaaatgtcacctgttatgtgagccgggcgaaaaccggtggtattaaagggggattgggtctggcggaagatacctccgatgcggccatttcttgtcagcaagtcgggccgattgaactgagcgatcgtattaaaaacggcaaagctcagggcgaggtagtattcaaaaaacgcacgtccctggtctttaagagcttacaggtcgtgcgcttttatgatgccaaacgcaacgcgctcgcttatctggcttactccgacaaagttgtagaaggtagcccgaaaaacgcgattagcgcggttcctgtcatgccgtggcggcaataacagaggcgatttatgcaacgggaaacggtctggttagtggaagatgagcaagggatagccgacacgctggtctacatgttgcagcaggaaggttttgccgtcgaggtctttgagcgaggcttgccggtgctggataaagctcgcaagcaggtacccgacgtcatgattctcgatgttggtctgccggatattagcggctttgaattgtgccgccagttactggcgctccatccggcgttacctgtactgttcctgacggcccgaagtgaagaggtcgatcgcctgcttgggctggaaattggtgctgacgactacgtggctaaaccgtttagtccccgcgaagtgtgcgccagggtgcgcaccttactgcgtcgggtgaagaagttcagcacgccgtctcccgtcatccgtattggacattttgaattgaatgaacccgcggcgcagatcagctggtttgacacgccattagcgctgactcggtatgagtttttattgttgaagacgttactcaagagtccgggccgcgtctggtcccgccagcaactgatggatagcgtatgggaagatgcgcaggacacctacgatcgcaccgtcgatacccacattaaaacgctgcgtgccaagctgcgcgccatcaaccccgatcttagtccgattaatactcatcgcggcatgggatatagcctgaggggcctgtaatgcgtatcggcatgcggttgttgctgggctattttttactggtggcggtggcagcctggttcgtactggccatttttgtcaaagaagttaaaccgggcgtgcgaagagcaacggaggggacgttgatcgacaccgcaacgttgctggcggagctggcgcgtcccgatttgctctctggggacccaacgcatgggcaactggcgcaggcgtttaatcagctacaacatcgcccgtttcgcgccaatatcggtggcattaacaaagtgcgcaatgaatatcatgtctatatgaccgatgcgcagggcaaagtattgttcgatagcgcaaataaagccgttggacaggattatagccgctggaatgacgtctggctaacgttgcgtggtcagtatggtgcgcgcagcacgttgcaaaatcctgccgatcccgaaagttctgtgatgtatgttgccgcaccgattatggacggcagccggcttattggcgttttgagcgtaggcaaaccgaacgcggcgatggctccggtcattaagcgtagcgagcggcgaattttatgggccagcgccattttgttggggattgcactggtgattggcgcaggcatggtttggtggatcaaccgctctattgcccggctcactcgctatgctgattccgtcactgacaataagcccgttcctctccccgatctcggtagtagcgagttgcgtaaactcgcgcaggcgctggaaagtatgcgcgtgaagctggaagggaaaaactatattgagcagtatgtttacgcattaactcatgagctaaaaagcccactggcggcgattcgtggagcggcggaaattttacgcgaaggtccgccgccggaagtggtggctcgttttactgacaacattctgacgcaaaatgcgcgtatgcaggcattggtagaaacgttactacgccaggcaagactggagaatcgtcaggaagtcgttctgactgctgttgatgtggcggcattattccgccgcgtcagcgaagcgcgcaccgtgcagttggcagaaaaaaaaatcactctgcatgttacgcccaccgaggttaacgttgctgctgaaccggcgttactggagcaggcgctgggaaatttactggataacgccatcgattttacccccgagagcggttgcatcacgctaagcgccgaagtggatcaggaacacgtcacgcttaaggtgctggataccggtagtggtattcctgactacgcgcttagtcgtatttttgaacgcttttactctttgcctcgtgcaaatgggcaaaaaagcagcggtctggggttggcgttcgtcagtgaggtcgcccgtttgtttaacggcgaagtcacgctgcgcaacgtgcaggaaggtggcgtgctggccagccttcgacttcaccgtcacttcacataacttcaaattcttcccacatagtcttcgtatcctgctgccattgcaaaggagaagactatgttgaaatcccccctgttctggaaaatgactagcctgtttggtgcagtattgctgttgttgattccgataatgctgattcggcaggtgattgtcgaacgtgctgattaccgtagcgatgtggaagatgcgattcgccaaagtaccagcgggccgcaaaaactcgttgggccgctcatcgctattcctgtgaccgagctttatacggtgcaggaagaggataaaaccgtggagcggaaacgaagttttatccatttttggttacctgagagtttgatggttgatggcaatcagaacgtggaagaacgcaagatagggatttataccggtcaggtctggcacagtgatttaacgttaaaagccgatttcgatgttagccgtcttagcgaactcaacgcgccaaatatcaccttaggcaagccatttattgtgattagcgtcggggatgcgcgtggtattggtgtggtgaaagcgcctgaagttaacggaacggcgctgaccattgaacccggcaccgggttagagcaaggcgggcagggcgtgcatatccctttacctgaaggggactggcggaagcagaacctgaagctgaatatggccctgaatttaagcggtaccggcgatctttctgtggtgcctggcgggcgtaatagcgaaatgaccttaaccagcaactggccgcatcccagttttttaggtgattttctaccagccaaacgggaagttagcgagagtggttttcaggcgcactggcaaagcagctggtttgctaataatctcggtgagcgttttgctagtggcaatgataccggctgggaaaacttcccggcgtttagcgtcgcagtaacgacgccagccgatcaataccaattaactgaccgggcgactaagtacgccattctgctgattgcactgacttttatggcgttctttgtttttgaaacgctcaccgcgcaacgtttacacccaatgcaatatttgctggtggggcttagtttggtgatgttttatttgctcttgctggcgctttctgaacataccggttttaccgtggcatggataatcgccagtctgattggggcgataatgaacggtatttatttgcaagcggtattgaaaggttggtgcaacagcatgttgtttaccctcgcgctgttgttgctggatggtgtgatgtggggactgctcaactctgccgatagcgcgctgttgttgggaaccagtgtgctggtggtggcgctggccggcatgatgtttgtgacccgtaatatcgactggtatgcgtttagtctgccgaaaatgaaagccagtaaagaagttacaacggacgatgagttacgtatctggaaataaggttgaaaaataaaaacggcgctaaaaagcgccgttttttttgacggtggtaaagccgattaatcttccagatcaccgcagaagcgataaccttcaccgtgaatggtggcgatgatttccggcgtatccggcgtagattcgaaatgtttacgaatacggcggatcgtcacgtctacagtacggtcgtgcggtttcagctcacggccggtcattttcttcagcagttcagcacgggactgaattttgcctgggttttcacagaagtgaagcatggcgcggaactcgctgcgcggcagcttgtactgctcgccatcagggccgatcaagctacggctgttgatgtccagttcccaaccattgaacttgtagctttcaacgctacgacgttcttcgctgacagtacccagattcatggtacgggacagtaggttgcgtgcacgaatcgtcagttcacgcgggttgaacggtttggtgatgtagtcatctgcaccgatttcgaggccgagaattttatcgacttcgttgtcacggccagtcaggaacatcaacgcaacattcgcctgctcgcgcagttcacgcgctaacagaagaccgttcttacccggcagattgatatccatgatcaccaggttgatgtcatattcagagaggatctgatgcatttccgcgccatctgtcgcttcgaaaacatcatagccttccgcttcgaaaatacttttcaacgtgttgcgtgttaccaactcgtcttcaacgataagaatgtgcggggtctgcatgtttgctacctaaattgccaactaaatcgaaacaggaagtacaaaagtccctgacctgcctgatgcatgctgcaaattaacatgatcggcgtaacatgactaaagtacgtaattgcgttcttgatgcactttccatcaacgtcaacaacatcattagcttggtcgtgggtactttccctcaggacccgacagtgagtaaaacggctgtcatcctaaccattttaacagcaacataacaggctaagaggggccggacacccaataaaactacgcttcgttgacatatatcaagttcaattgtagcacgttaacagtttgatgaaatcatcgtatctaaatgctagctttcgtcacattattttaataatccaactagttgcatcatacaactaataaacgtggtgaatccaattgtcgagatttattttttataaaattatcctaagtaaacagaaggatatgtagcattttttaacaactcaaccgttagtacagtcaggaaatagtttagccttttttaagctaagtaaagggctttttctgcgacttacgttaagaatttgtaaattcgcaccgcgtaataagttgacagtgatcacccggttcgcggttatttgatcaagaagagtggcaatatgcgtataacgattattctggtcgcacccgccagagcagaaaatattggggcagcggcgcgggcaatgaaaacgatggggtttagcgatctgcggattgtcgatagtcaggcacacctggagccagccacccgctgggtcgcacatggatctggtgatattattgataatattaaagttttcccgacattggctgaaagcttacacgatgtcgatttcactgtcgccaccactgcgcgcagtcgggcgaaatatcattactacgccacgccagttgaactggtgccgctgttagaggaaaaatctagttggatgagccatgccgcgctggtgtttggtcgcgaagattccgggttgactaacgaagagttagcgttggctgacgttcttactggtgtgccgatggtggcggattatcctagcctcaatctggggcaggcggtgatggtctattgctatcaattagcaacattaatacaacaaccggcgaaaagtgatgcaacggcagaccaacatcaactgcaagctttacgcgaacgagccatgacattgctgacgactctggcagtggcagatgacataaaactggtcgactggttacaacaacgcctggggcttttagagcaacgagacacggcaatgttgcaccgtttgctgcatgatattgaaaaaaatatcaccaaataaaaaacgccttagtaagtatttttc
